(19) United States
(12) Patent Application Publication
(10) Pub. No.: US 2013/0123178 A1
(43) Pub. Date: May 16, 2013

(54) GLUCAGON SUPERFAMILY PEPTIDES EXHIBITING NUCLEAR HORMONE RECEPTOR ACTIVITY

(71) Applicants: Richard D. DiMarchi, Carmel, IN (US); Bin Yang, Bloomington, IN (US); Brian Finan, Bloomington, IN (US)

(72) Inventors: Richard D. DiMarchi, Carmel, IN (US); Bin Yang, Bloomington, IN (US); Brian Finan, Bloomington, IN (US)

(73) Assignee: INDIANA UNIVERSITY RESEARCH AND TECHNOLOGY CORPORATION, Indianapolis, IN (US)

(21) Appl. No.: 13/697,018

(22) PCT Filed: May 10, 2011
(86) PCT No.: PCT/US2011/035913

§ 371 Date: Nov. 9, 2012

Related U.S. Application Data
(60) Provisional application No. 61/334,435, filed on May 13, 2010.
(60) Provisional application No. 61/432,077, filed on Jan. 12, 2011.

(51) Int. Cl. C07K 14/72; C07K 14/605

(52) U.S. Cl. CPC C07K 14/721; C07K 14/605; C07K 14/72
USPC 514/10.2; 530/308; 514/11.7

(57) ABSTRACT

Provided herein are glucagon superfamily peptides conjugated with NHR ligands that are capable of acting at a nuclear hormone receptor. Also provided herein are pharmaceutical compositions and kits of the conjugates of the invention. Further provided herein are methods of treating a disease, e.g., a metabolic disorder, such as diabetes and obesity, comprising administering the conjugates of the invention.

### CROSS REFERENCE TO RELATED APPLICATIONS

[0001] This application claims priority to U.S. Provisional Patent Application Nos. 61/334,435, filed on May 13, 2010, and 61/432,077, filed on Jan. 12, 2011. The disclosure of each provisional application is hereby expressly incorporated by reference in its entirety.

### INCORPORATION BY REFERENCE OF MATERIAL SUBMITTED ELECTRONICALLY

[0002] Incorporated by reference in its entirety is a computer-readable amino acid sequence listing submitted concurrently herewith and identified as follows: One 889,723 byte ASCII (Text) file named “44822B_SeqListing,” created on Apr. 29, 2011.

### BACKGROUND OF THE INVENTION

[0003] 1. Field of the Disclosure

[0004] This invention provides glucagon superfamily peptides conjugated to nuclear hormone receptor ligands that are capable of acting at nuclear hormone receptors.

[0005] 2. Brief Description of Related Technology

[0006] Nuclear hormone receptor proteins form a class of ligand activated proteins that, when bound to specific sequences of DNA, serve as on-off switches for transcription within the cell nucleus. These switches control the development and differentiation of skin, bone and behavioral centers in the brain, as well as the continual regulation of reproductive tissues.

[0007] Nuclear hormone receptor ligands such as steroids, sterols, retinoids, thyroid hormones, and vitamin D function to activate nuclear hormone receptors. The interaction of the hormone and receptor triggers a conformational change in the receptor, which results in the up-regulation of gene expression. The level of cellular signal transduction activated by the interaction of a ligand and a nuclear hormone receptor is determined by the number of ligands and receptors available for binding, and by the binding affinity between the ligand and the receptor. Many ligands and corresponding analogs that bind to nuclear hormone receptors are used as medication to treat, for example, Parkinson's disease (NURR1), sleep disorders (RZRβ), arthritis and cerebellar ataxia (RORα), central nervous system disorders (NOR-1, Rev-ErbAβ, Tlx, NGFI-Bβ, HZF-2α, COUP-TFα, COUP-TFβ, COUR-TFγ, NUR77), hypercholesterolemia (LXRα, COR), obesity (Rev-ErbAα), diabetes (HNF4α), immune disorders (TOR), metabolic disorders (MB67α, SHP, FXR, SF-1, LXRβ), and infertility and contraception (GCNF, TR2-11α,β, TR4, ERα,β ERRα,β).

[0008] Pre-proglucagon is a 158 amino acid precursor polypeptide that is processed in different tissues to form a number of different proglucagon-derived peptides, including glucagon, glucagon-like peptide-1 (GLP-1), glucagon-like peptide-2 (GLP-2) and oxyntomodulin (OXM), that are involved in a wide variety of physiological functions, including glucose homeostasis, insulin secretion, gastric emptying, and intestinal growth, as well as the regulation of food intake. Glucagon is a 29-amino acid peptide that corresponds to amino acids 33 through 61 of pre-proglucagon, while GLP-1 is produced as a 37-amino acid peptide that corresponds to amino acids 72 through 108 of pre-proglucagon. GLP-1 (7-36) amide or GLP-1 (7-37) acid are biologically potent forms of GLP-1, that demonstrate essentially equivalent activity at the GLP-1 receptor.

[0009] Glucagon is used in the acute treatment of severe hypoglycemia. Oxyntomodulin has been reported to have pharmacological ability to suppress appetite and lower body weight. GLP-1 and GLP-1 receptor agonists are used as treatment for Type II diabetes. Exendin-4 is a peptide present in the saliva of the Gila monster that resembles GLP-1 in structure, and like glucagon and GLP-1, increases insulin release.

[0010] Gastric inhibitory polypeptide (GIP) is also known as a glucose-dependent insulinotropic peptide, and is a member of the secretin family of hormones. GIP is derived from a 153-amino acid proprotein encoded by the GIP gene and circulates as a biologically active 42-amino acid peptide. The GIP gene is expressed in the small intestine as well as the salivary glands and is a weak inhibitor of gastric acid secretion. In addition to its inhibitory effects in the stomach, in the presence of glucose, GIP enhances insulin release by pancreatic beta islet cells when administered in physiological doses. GIP is believed to function as an enteric factor that stimulates the release of pancreatic insulin and that may play a physiological role in maintaining glucose homeostasis.

[0011] Osteocalcin is a noncollagenous protein found in bone and dentin. It is secreted by osteoblasts and thought to play a role in mineralization and calcium ion homeostasis. Osteocalcin has also been reported to function as a hormone in the body, causing beta cells in the pancreas to release more insulin, and at the same time directing fat cells to release the hormone adiponectin, which increases sensitivity to insulin.

### SUMMARY OF THE INVENTION

[0012] Provided herein are glucagon superfamily peptides conjugated to nuclear hormone receptor ligands (“NHR ligands”). These conjugates with plural activities are useful for the treatment of a variety of diseases.

[0013] The glucagon superfamily peptide conjugates of the invention can be represented by the following formula:

Q-L-Y

wherein Q is a glucagon superfamily peptide, Y is a NHR ligand, and L is a linking group or a bond.

[0014] The glucagon superfamily peptide (Q) in some embodiments can be a glucagon related peptide that exhibits agonist activity at the glucagon receptor, agonist activity at the GLP-1 receptor, agonist activity at the GIP receptor, co-agonist activity at the glucagon and GLP-1 receptors, co-agonist activity at the glucagon and GIP receptors, co-agonist activity at the GLP-1 and GIP receptors, or tri-agonist activity at the glucagon, GIP, and GLP-1 receptors. In some embodiments, the glucagon related peptide exhibits antagonist activity at the glucagon, GLP-1 or GIP receptor. The activity of the glucagon related peptide at the glucagon receptor, at the GLP-1 receptor, or at the GIP receptor can be in accordance with any of the teachings set forth herein. In some specific embodiments, the glucagon related peptide exhibits at least 0.1% activity of native glucagon at the glucagon receptor, at least 0.1% activity of native GLP-1 at the GLP-1 receptor, or at least 0.1% activity of native GIP at the GIP receptor.

[0015] The NHR ligand (Y) is wholly or partly non-peptidic and acts at a nuclear hormone receptor with an activity in accordance with any of the teachings set forth herein. In some embodiments the NHR ligand has an EC₅₀ or IC₅₀ of about 1 mM or less, or 100 μM or less, or 10 μM or less, or 1 μM or less. In some embodiments, the NHR ligand has a molecular weight of up to about 5000 daltons, or up to about 2000 daltons, or up to about 1000 daltons, or up to about 500 daltons. The NHR ligand may act at any of the nuclear hormone receptors described herein or have any of the structures described herein.

[0016] In some embodiments, the glucagon related peptide has an EC₅₀ (or IC₅₀) at the glucagon receptor within about 100-fold, or within about 75-fold, or within about 50-fold, or within about 40-, 30-, 25-, 20-, 15-, 10- or 5-fold of the EC₅₀ or IC₅₀ of the NHR ligand at its nuclear hormone receptor. In some embodiments, the glucagon related peptide has an EC₅₀ (or IC₅₀) at the GLP-1 receptor within about 100-fold, or within about 75-fold, or within about 50-fold, or within about 40-, 30-, 25-, 20-, 15-, 10- or 5-fold of the EC₅₀ or IC₅₀ of the NHR ligand at its nuclear hormone receptor. In some embodiments, the glucagon related peptide has an EC₅₀ (or IC₅₀) at the GIP receptor within about 100-fold, or within about 75-fold, or within about 50-fold, or within about 40-, 30-, 25-, 20-, 15-, 10- or 5-fold of the EC₅₀ or IC₅₀ of the NHR ligand at its nuclear hormone receptor.

[0017] In some aspects of the invention, prodrugs of Q-L-Y are provided wherein the prodrug comprises a dipeptide prodrug element (A-B) covalently linked to an active site of Q via an amide linkage. Subsequent removal of the dipeptide under physiological conditions and in the absence of enzymatic activity restores full activity to the Q-L-Y conjugate.

[0018] In some aspects of the invention, pharmaceutical compositions comprising the Q-L-Y conjugate and a pharmaceutically acceptable carrier are also provided.

[0019] In other aspects of the invention, methods are provided for administering a therapeutically effective amount of a Q-L-Y conjugate described herein for treating a disease or medical condition in a patient. In some embodiments, the disease or medical condition is selected from the group consisting of metabolic syndrome, diabetes, obesity, liver steatosis, and a neurodegenerative disease.

### BRIEF DESCRIPTION OF THE DRAWINGS

[0020] FIG. 1 presents an alignment of the amino acid sequences of various glucagon superfamily peptides or relevant fragments thereof. The amino acid sequence presented are GHRH (SEQ ID NO: 1619), PHI (SEQ ID NO: 1622), VIP (SEQ ID NO: 1620), PACAP-27 (SEQ ID NO: 1621), Exendin-4 (SEQ ID NO: 1618), GLP-1 (SEQ ID NO: 1603), Glucagon (SEQ ID NO: 1601), Oxyntomodulin (SEQ ID NO: 1606), GIP (SEQ ID NO: 1607), GLP-2 (SEQ ID NO: 1608) and Secretin (SEQ ID NO: 1624). The alignment shows how amino acid positions of glucagon can correspond to amino acid positions in other glucagon superfamily peptides.

[0021] FIG. 2 illustrates the effect of administration of the indicated GLP-1 conjugates on change in body weight and blood glucose levels in db/db mice. FIG. 2a illustrates that mice that were administered a high dose of the GLP-1 (Aib²A²²CexK⁴⁰)/Estrogen(17-ester) conjugate experienced a slightly greater decrease in body weight than mice that were administered GLP-1 alone, but similar to vehicle. FIGS. 2b and 2c show mice that were administered a high dose of the GLP-1 (Aib²A²²CexK⁴⁰)/Estrogen(17-ester) conjugate experienced the greatest decrease in blood glucose levels between days 0 and 14, demonstrating that the enhanced ability to improve glucose independent of a change in body weight.

[0022] FIG. 3 illustrates the effect of administration of the indicated GLP-1 conjugates on blood glucose, body weight, fat mass, and lean muscle mass in diet induced obese mice. FIG. 3a illustrates the results of a ipGTT test on day 21. FIGS. 3b-d illustrate the effect of administration of the indicated GLP-1 conjugates on the change in body weight (FIG. 3b), change in fat mass (FIG. 3c), and change in lean muscle mass (FIG. 3d) in diet induced obese mice. Mice that were administered a high dose of the GLP-1 (Aib²A²²CexK⁴⁰)/Estrogen(17-ester) conjugate experienced the greatest decrease in body weight, and fat mass, and the least amount of change in lean muscle mass. FIG. 3e illustrates the effect of administration of the indicated GLP-1 conjugates on changes in blood glucose in diet induced obese mice. Mice that were administered a high dose of the GLP-1 (Aib²A²²CexK⁴⁰)/Estrogen(17-ester) conjugate experienced the greatest decrease in blood glucose levels between days 0 and 14. These results demonstrate the added dose dependent efficacy of adding estrogen to a weak A22-based GLP-1 agonist.

[0023] FIG. 4 illustrates the effect of administration of the indicated GLP-1 conjugates on blood glucose levels, change in body weight, change in fat mass, and change in blood glucose. FIG. 4a illustrates the effect of administration of the indicated GLP-1 conjugates in an intraperitoneal glucose tolerance test on blood glucose levels in diet induced obese mice after fourteen daily doses. FIGS. 4b-c illustrate the effect of administration of the indicated GLP-1 conjugates on the change in body weight and change in fat mass in diet induced obese mice. Mice that were administered a high dose of the GLP-1/Estrogen conjugates experienced the greatest decrease in total body weight (FIG. 4b). Fat mass was decreased in the high dose estrogen ether conjugate relative to vehicle-treated animals (FIG. 4c). FIG. 4d illustrates the effect of administration of the indicated GLP-1 conjugates on changes in blood glucose in diet induced obese mice. At the high dose, mice that were administered either GLP-1 (Aib²E¹⁶Cex K⁴⁰)/Estrogen conjugate experienced a greater change in blood glucose levels between days 0 and 21 than mice that were administered GLP-1 (Aib²E¹⁶CexK⁴⁰) alone.

[0024] FIG. 5 illustrates the effect of administration of the indicated GLP-1 conjugates on change in body weight and change in blood glucose in diet induced obese mice. Mice that were administered a high dose of the GLP-1/Estrogen conjugates experienced the greatest decrease in body weight (FIG. 5a). Mice that were administered either high or low doses of GLP-1(Aib²E¹⁶K⁴⁰Cex) experienced the greatest change in blood glucose, along with that of the high dose GLP-1 (Aib²E¹⁶K⁴⁰Cex)/estrogen(3-ether) (FIG. 5b).

[0025] FIG. 6 illustrates the effect of administration of the indicated GLP-1 conjugates on the change in body weight, fat mass, and changes in blood glucose in diet induced obese mice. Mice that were administered either estrogen conjugate experienced the greatest decrease in total body weight (FIG. 6a). The analysis of fat mass (FIG. 6b) was relatively constant with total loss in body weight. Mice that were administered a GLP-1 (Aib²E¹⁶K⁴⁰Cex)/Estrogen(3-ether) or a GLP-1 (Aib²E¹⁶K⁴⁰Cex)/Estrogen(17-ester) conjugate experienced the greatest change in blood glucose levels between days 0 and 7 (FIG. 6c).

[0026] FIG. 7 illustrates the effect of administration of the indicated GLP-1 conjugates on the change in body weight and blood glucose in diet induced obese mice. Mice that were administered the GLP-1 (Aib²E¹⁶K⁴⁰Cex)/Estrogen conjugates experienced the greatest decrease in total body weight (FIG. 7a) and blood glucose levels (FIG. 7b) over a period of 7 days. Neither the A22 or the d-amino acid containing peptides demonstrated much lowering relative to the GLP-1 (Aib²E¹⁶CexK⁴⁰)/Estrogen conjugates. Additionally, the estrogen conjugates of GLP-1(Aib²E¹⁶CexK⁴⁰) were clearly more effective than the non-estrogen form of the same peptide.

[0027] FIG. 8 illustrates the effect of the administration of the indicated GLP-1 conjugates on change in body weight, blood glucose, and fat mass. The d-amino acid containing peptides were clearly inferior in all measures of efficacy to the 1-amino acid containing peptides. FIG. 8a illustrates the effect of administration of the indicated GLP-1 conjugates on the change body weight in diet induced obese mice. There was little apparent difference in body weight lowering at these doses for the peptides with and without the estrogen. Nonetheless, in FIG. 8b effect of administration of the indicated GLP-1 conjugates on the change in blood glucose in diet induced obese mice are shown. Mice that were administered the GLP-1 (Aib²E¹⁶CexK⁴⁰)/Estrogen(3-ester) conjugate experienced the greatest change in blood glucose levels between days 0 and 7 in vivo, far more than the animals treated with the same peptide but without estrogen. This demonstrated the direct improvement in blood glucose independent of a difference in body weight. FIG. 8c illustrates the effect of the administration of the indicated GLP-1 conjugates on change in fat mass.

[0028] FIG. 9 illustrates the effect of administration of the indicated GLP-1 conjugates on the change in body weight, amount of fat mass, and change in blood glucose in diet induced obese mice. Mice that were administered the d-amino acid containing GLP-1/Estrogen(3-ester) conjugate at elevated doses relative to the control 1-containing amino acid experienced the greatest decrease in body weight (FIG. 9a) and had the least amount of fat mass (FIG. 9b). There was clear dose dependent glucose lowering in the d-amino acid containing GLP-1/Estrogen(3-ester) conjugate between days 0 and 7 and enhanced at the highest dose relative to mice that were administered GLP-1 alone (FIG. 9c).

[0029] FIG. 10 illustrates the effect of administration of the indicated GLP-1 conjugates on the change in body weight and change in blood glucose levels in diet induced obese mice. Mice that were administered the d-amino acid containing GLP-1/Estrogen conjugates where the estrogen was covalently linked as either a stable amide or ester that was unstable in vivo. The animals treated with the unstable ester conjugate experienced the greatest decrease in total body weight (FIG. 10a). FIG. 10b illustrates that mice administered the d-amino acid containing GLP-1/Estrogen ester conjugate experienced a greater change in blood glucose levels between days 0 and 7 than mice that were administered a comparable d-amino acid containing peptide but with a stable estrogen conjugate.

[0030] FIG. 11 illustrates the activity of the indicated conjugates at the GLP-1 receptor and the estrogen receptor. The active, metastable GLP-1/estrogen conjugates were equally active at the GLP-1 receptor (FIG. 11a), and had variable activity at the estrogen receptor (FIG. 11b).

[0031] FIG. 12 illustrates the effect of administration of the indicated GLP-1 conjugates on the change in body weight, food intake, blood glucose, liver weight, and uterus weight in diet induced obese mice. Mice that were administered an inactive, estrogen-labile d-amino acid containing GLP-1/Estrogen(3-ester) conjugate experienced the greatest decrease in body weight, with the effect more pronounced at a high dose (FIG. 12a). FIG. 12b illustrates that mice that were administered the inactive, estrogen-labile d-amino acid containing GLP-1/Estrogen(3-ester) conjugate consumed significantly less food than mice that were administered inactive d-amino acid containing GLP-1 alone or an estrogen-stable d-amino acid containing GLP-1/Estrogen(3-ether) conjugate, with the effect more pronounced at a high dose. FIG. 12c shows that a high dose of the estrogen-labile, inactive d-amino acid containing GLP-1/Estrogen(3-ester) conjugate lowers blood glucose levels relative to vehicle treated animals. FIG. 12d shows that mice that were administered the estrogen-labile, inactive d-amino acid containing GLP-1/Estrogen(3-ether) conjugate experienced a subtle but greater decrease in liver weight than mice that were administered the estrogen-stable, inactive d-amino acid containing GLP-1/Estrogen(3-ether) conjugate. FIG. 12e shows that mice that were administered the inactive, estrogen-labile d-amino acid containing GLP-1/Estrogen(3-ester) conjugate experienced a significantly greater increase in uterus weight than mice that were administered inactive GLP-1 alone or the inactive, estrogen-stable d-amino acid containing GLP-1/Estrogen(3-ether) conjugate.

[0032] FIG. 13 illustrates the effect of administration of the indicated GLP-1 conjugates on the change in body weight, fat mass, food intake, blood glucose levels, and uterine weight of ovariectomized mice. FIG. 13a shows that mice that were administered the active, estrogen-stable GLP-1 agonist/Estrogen(3-ether) conjugate experienced a greater decrease in body weight than mice that were administered the active, GLP-1 agonist alone, the inactive, estrogen-labile d-amino acid containing GLP-1/Estrone(3-ester) conjugate, or the inactive, estrogen-stable d-amino acid containing GLP-1/Estrogen(3-ether) conjugate. FIG. 13b shows that mice that were administered the GLP-1 agonist, the inactive, estrogen-labile d-amino acid containing GLP-1/Estrone(3-ester) conjugate, and the active, estrogen-stable GLP-1 agonist/Estrogen(3-ether) conjugate exhibited a decrease in fat mass. FIG. 13c shows that mice that were administered the active, estrogen-stable GLP-1 agonist/Estrogen(3-ether) conjugate consumed less food than mice that were administered the active, GLP-1 agonist alone, the inactive, estrogen-labile d-amino acid containing GLP-1/Estrone(3-ester) conjugate, or the inactive, estrogen-stable d-amino acid containing GLP-1/Estrogen(3-ether) conjugate. FIG. 13d shows that mice that were administered the inactive, estrogen-labile d-amino acid containing GLP-1/Estrone(3-ester) conjugate, or inactive, estrogen-stable d-amino acid containing GLP-1/Estrogen(3-ether) conjugate, or the active, estrogen-stable GLP-1 agonist/Estrogen(3-ether) conjugate experienced a decrease in blood glucose levels greater than vehicle, and that mice that were administered the inactive, estrogen-stable d-amino acid containing GLP-1/Estrogen(3-ether) conjugate did not exhibit a decrease in blood glucose levels. FIG. 13e shows that mice that were administered the inactive, estrogen-labile d-amino acid containing GLP-1/Estrone(3-ester) conjugate experienced a significantly greater increase in uterus weight than mice that were administered GLP-1 alone, the inactive, estrogen-stable d-amino acid containing GLP-1/Estrogen(3-ether) conjugate, or the active, estrogen-stable GLP-1/Estrogen(3-ether) conjugate.

[0033] FIG. 14 illustrates the effect of administration of the indicated GLP-1 conjugates on the change in body weight, fat mass, blood glucose, and uterine weight of ovariectomized mice. Mice that were administered the metastable GLP-1 agonist/Estrogen conjugates experienced a greater decrease in body weight and fat mass than mice that were administered the active, GLP-1 agonist alone or the active, estrogen-labile GLP-1 agonist/Estrone(3-ester) conjugate (FIGS. 14a and 14b). Mice that were administered the metastable enzyme- and acid-labile conjugates, GLP-1 agonist/Estrogen(17-cathepsin) and GLP-1 agonist/Estrogen(17-hydrazone), respectively, initially had the greatest decrease in body weight, while the metastable thiol reduction-labile conjugate, GLP-1 agonist/Estrogen(17-carbamate disulfide), exhibited the overall greatest decrease in body weight. FIG. 14c shows that mice that were administered the metastable thiol reduction- and acid-labile conjugates, GLP-1 agonist/Estrogen(17-carbamate disulfide) and GLP-1 agonist/Estrogen(17-hydrazone), respectively, experienced a greater decrease in blood glucose levels than the estrogen-labile GLP-1 agonist/Estrone(3-ester) conjugate. FIG. 14d shows that mice that were administered the estrogen-labile GLP-1/Estrone(3-ester) conjugate experienced a significantly greater increase in uterus weight than mice that were administered any of the three metastable GLP-1/Estrogen conjugates.

[0034] FIG. 15 illustrates the effect of administration of the indicated GLP-1 conjugates on the change in body weight and cumulative food intake. Mice that were administered the active, estrogen-stable GLP-1 agonist/Estrogen(3-ether) conjugate experienced a significantly greater decrease in body weight than mice that were administered the active, GLP-1 agonist alone or the active, estrogen-labile GLP-1 agonist/Estrogen(3-ester) conjugate (FIG. 15a). FIG. 15b shows that mice that were administered the active, estrogen-stable GLP-1 agonist/Estrogen(3-ether) conjugate consumed significantly less food than mice that were administered the active, GLP-1 agonist alone or the active, estrogen-labile GLP-1 agonist/Estrogen(3-ester) conjugate.

[0035] FIGS. 16a-e depict HPLC profiles that illustrate the stability of the indicated GLP-1/Estrogen conjugates in human plasma at 37° C. The estrogen-stable GLP-1/Estrogen(3-ether) conjugates exhibited no estrogen release over 72 hours, while the estrogen-labile GLP-1/Estrogen(3-ester) conjugates showed substantial estrogen release after 3 hours and complete estrogen release within 6 hours.

[0036] FIGS. 17a-c illustrate the effect of administration of the indicated conjugates on the change in body weight percentage, cumulative food intake, and blood glucose levels of diet-induced obesity mice.

[0037] FIGS. 18a-c illustrate the effect of administration of the indicated conjugates on the change in body weight percentage, cumulative food intake, and blood glucose levels on diet-induced obesity wild type mice, estrogen receptor beta knock-out (ERβ KO) mice, and estrogen receptor alpha knock-out (ERα KO) mice.

[0038] FIG. 19 illustrates the effect of the indicated GLP-1 conjugates on blood glucose levels with time. Mice that were administered the GLP-1 agonist showed the least effective lowering of blood glucose over 48 hours (except for vehicle), while mice that were administered the estrogen-stable GLP-1 agonist/Estrogen (3-ether) conjugate showed the most effective decrease in blood glucose over 48 hours.

### DETAILED DESCRIPTION OF THE INVENTION

### Definitions

[0039] In describing and claiming the invention, the following terminology will be used in accordance with the definitions set forth below.

[0040] The term “about” as used herein means greater or lesser than the value or range of values stated by 10 percent, but is not intended to designate any value or range of values to only this broader definition. Each value or range of values preceded by the term “about” is also intended to encompass the embodiment of the stated absolute value or range of values.

[0041] As used herein, the term “pharmaceutically acceptable carrier” includes any of the standard pharmaceutical carriers, such as a phosphate buffered saline solution, water, emulsions such as an oil/water or water/oil emulsion, and various types of wetting agents. The term also encompasses any of the agents approved by a regulatory agency of the US Federal government or listed in the US Pharmacopeia for use in animals, including humans.

[0042] As used herein the term “pharmaceutically acceptable salt” refers to salts of compounds that retain the biological activity of the parent compound, and which are not biologically or otherwise undesirable. Many of the compounds disclosed herein are capable of forming acid and/or base salts by virtue of the presence of amino and/or carboxyl groups or groups similar thereto.

[0043] Pharmaceutically acceptable base addition salts can be prepared from inorganic and organic bases. Salts derived from inorganic bases, include by way of example only, sodium, potassium, lithium, ammonium, calcium and magnesium salts. Salts derived from organic bases include, but are not limited to, salts of primary, secondary and tertiary amines. Pharmaceutically acceptable acid addition salts may be prepared from inorganic and organic acids. Salts derived from inorganic acids include hydrochloric acid, hydrobromic acid, sulfuric acid, nitric acid, phosphoric acid, and the like. Salts derived from organic acids include acetic acid, propionic acid, glycolic acid, pyruvic acid, oxalic acid, malic acid, malonic acid, succinic acid, maleic acid, fumaric acid, tartaric acid, citric acid, benzoic acid, cinnamic acid, mandelic acid, methanesulfonic acid, ethanesulfonic acid, p-toluene-sulfonic acid, salicylic acid, and the like.

[0044] As used herein, the term “treating” includes prophylaxis of the specific disorder or condition, or alleviation of the symptoms associated with a specific disorder or condition and/or preventing or eliminating said symptoms. For example, as used herein the term “treating diabetes” will refer in general to altering glucose blood levels in the direction of normal levels and may include increasing or decreasing blood glucose levels depending on a given situation.

[0045] As used herein an “effective” amount or a “therapeutically effective amount” of a glucagon peptide refers to a nontoxic but sufficient amount of the peptide to provide the desired effect. For example one desired effect would be the prevention or treatment of hypoglycemia, as measured, for example, by an increase in blood glucose level. An alternative desired effect for the glucagon peptides of the present disclosure would include treating hyperglycemia, e.g., as measured by a change in blood glucose level closer to normal, or inducing weight loss/preventing weight gain, e.g., as measured by reduction in body weight, or preventing or reducing an increase in body weight, or normalizing body fat distribution. The amount that is “effective” will vary from subject to subject, depending on the age and general condition of the individual, mode of administration, and the like. Thus, it is not always possible to specify an exact “effective amount.” However, an appropriate “effective” amount in any individual case may be determined by one of ordinary skill in the art using routine experimentation.

[0046] The term, “parenteral” means not through the alimentary canal but by some other route, e.g., subcutaneous, intramuscular, intraspinal, or intravenous.

[0047] As used herein the term “patient” without further designation is intended to encompass any warm blooded vertebrate domesticated animal (including for example, but not limited to livestock, horses, cats, dogs and other pets), mammals, and humans.

[0048] The term “isolated” as used herein means having been removed from its natural environment. In some embodiments, the analog is made through recombinant methods and the analog is isolated from the host cell.

[0049] The term “purified,” as used herein relates to the isolation of a molecule or compound in a form that is substantially free of contaminants normally associated with the molecule or compound in a native or natural environment and means having been increased in purity as a result of being separated from other components of the original composition. The term “purified polypeptide” is used herein to describe a polypeptide which has been separated from other compounds including, but not limited to nucleic acid molecules, lipids and carbohydrates.

[0050] As used herein, the term “peptide” encompasses a sequence of 2 or more amino acids and typically less than 50 amino acids, wherein the amino acids are naturally occurring or coded or non-naturally occurring or non-coded amino acids. Non-naturally occurring amino acids refer to amino acids that do not naturally occur in vivo but which, nevertheless, can be incorporated into the peptide structures described herein. “Non-coded” as used herein refer to an amino acid that is not an L-isomer of any of the following 20 amino acids: Ala, Cys, Asp, Glu, Phe, Gly, His, Ile, Lys, Leu, Met, Asn, Pro, Gln, Arg, Ser, Thr, Val, Trp, Tyr.

[0051] As used herein, “partly non-peptidic” refers to a molecule wherein a portion of the molecule is a chemical compound or substituent that has biological activity and that does not comprises a sequence of amino acids.

[0052] As used herein, “non-peptidic” refers to a molecule has biological activity and that does not comprise a sequence of amino acids.

[0053] As used herein, the terms “polypeptide” and “protein” are terms that are used interchangeably to refer to a polymer of amino acids, without regard to the length of the polymer. Typically, polypeptides and proteins have a polymer length that is greater than that of “peptides.” In some instances, a protein comprises more than one polypeptide chain covalently or noncovalently attached to each other.

[0054] Throughout the application, all references to a particular amino acid position by number (e.g., position 28) refer to the amino acid at that position in native glucagon (SEQ ID NO: 1601) or the corresponding amino acid position in any analogs thereof. For example, a reference herein to “position 28” would mean the corresponding position 27 for an analog of glucagon in which the first amino acid of SEQ ID NO: 1601 has been deleted. Similarly, a reference herein to “position 28” would mean the corresponding position 29 for a analog of glucagon in which one amino acid has been added before the N-terminus of SEQ ID NO: 1601.

[0055] As used herein an “amino acid modification” refers to (i) a substitution or replacement of an amino acid of the reference peptide (e.g. SEQ ID NOs: 1601, 1603, 1607) with a different amino acid (naturally-occurring or coded or non-coded or non-naturally-occurring amino acid), (ii) an addition of an amino acid (naturally-occurring or coded or non-coded or non-naturally-occurring amino acid) to the reference peptide (e.g. SEQ ID NOs: 1601, 1603, 1607) or (iii) a deletion of one or more amino acids from the reference peptide (e.g. SEQ ID NOs: 1601, 1603, 1607).

[0056] In some embodiments, the amino acid substitution or replacement is a conservative amino acid substitution, e.g., a conservative substitution of the amino acid at one or more of positions 1, 2, 5, 7, 8, 10, 11, 12, 13, 14, 16, 17, 18, 19, 20, 21, 24, 27, 28 or 29. As used herein, the term “conservative amino acid substitution” is the replacement of one amino acid with another amino acid having similar properties, e.g., size, charge, hydrophobicity, hydrophilicity, and/or aromaticity, and includes exchanges within one of the following five groups:
[0057] I. Small aliphatic, nonpolar or slightly polar residues:
   [0058] Ala, Ser, Thr, Pro, Gly;
[0059] II. Polar, negative-charged residues and their amides and esters:
   [0060] Asp, Asn, Glu, Gln, cysteic acid and homocysteic acid;
[0061] III. Polar, positive-charged residues:
   [0062] His, Arg, Lys; Ornithine (Orn)
[0063] IV. Large, aliphatic, nonpolar residues:
   [0064] Met, Leu, Ile, Val, Cys, Norleucine (Nle), homocysteine
[0065] V. Large, aromatic residues:
   [0066] Phe, Tyr, Trp, acetyl phenylalanine

[0067] In some embodiments, the amino acid substitution is not a conservative amino acid substitution, e.g., is a non-conservative amino acid substitution.

[0068] As used herein the term “amino acid” encompasses any molecule containing both amino and carboxyl functional groups, wherein the amino and carboxyl groups are attached to the same carbon (the alpha carbon). The alpha carbon optionally may have one or two further organic substituents. For the purposes of the present disclosure designation of an amino acid without specifying its stereochemistry is intended to encompass either the L or D form of the amino acid, or a racemic mixture. However, in the instance where an amino acid is designated by its three letter code and includes a superscript number (i.e., Lys⁻¹), such a designation is intended to specify the native L form of the amino acid, whereas the D form will be specified by inclusion of a lower case d before the three letter code and superscript number (i.e., dLys⁻¹).

[0069] As used herein the term “hydroxyl acid” refers to an amino acid that has been modified to replace the alpha carbon amino group with a hydroxyl group.

[0070] As used herein the term “charged amino acid” refers to an amino acid that comprises a side chain that has a negative charge (i.e., deprotonated) or positive charge (i.e., protonated) in aqueous solution at physiological pH. For example negative-charged amino acids include aspartic acid, glutamic acid, cysteic acid, homocysteic acid, and homoglutamic acid, whereas positive-charged amino acids include arginine, lysine and histidine. Charged amino acids include the charged amino acids among the 20 coded amino acids, as well as atypical or non-naturally occurring or non-coded amino acids.

[0071] As used herein the term “acidic amino acid” refers to an amino acid that comprises a second acidic moiety (other than the alpha carboxylic acid of the amino acid), including for example, a side chain carboxylic acid or sulfonic acid group.

[0072] As used herein an “acylated” amino acid is an amino acid comprising an acyl group which is non-native to a naturally-occurring amino acid, regardless by the means by which it is produced. Exemplary methods of producing acylated amino acids and acylated peptides are known in the art and include acylating an amino acid before inclusion in the peptide or peptide synthesis followed by chemical acylation of the peptide. In some embodiments, the acyl group causes the peptide to have one or more of (i) a prolonged half-life in circulation, (ii) a delayed onset of action, (iii) an extended duration of action, (iv) an improved resistance to proteases, such as DPP-IV, and (v) increased potency at the glucagon superfamily peptide receptor.

[0073] As used herein, an “alkylated” amino acid is an amino acid comprising an alkyl group which is non-native to a naturally-occurring amino acid, regardless of the means by which it is produced. Exemplary methods of producing alkylated amino acids and alkylated peptides are known in the art and including alkylating an amino acid before inclusion in the peptide or peptide synthesis followed by chemical alkylation of the peptide. Without being held to any particular theory, it is believed that alkylation of peptides will achieve similar, if not the same, effects as acylation of the peptides, e.g., a prolonged half-life in circulation, a delayed onset of action, an extended duration of action, an improved resistance to proteases, such as DPP-IV, and increased potency at the glucagon superfamily peptide receptor.

[0074] The term “C₁-Cₙ alkyl” wherein n can be from 1 through 18, as used herein, represents a branched or linear alkyl group having from one to the specified number of carbon atoms. For example, C₁-C₆ alkyl represents a branched or linear alkyl group having from 1 to 6 carbon atoms. Typical C₁-C₁₈ alkyl groups include, but are not limited to, methyl, ethyl, n-propyl, iso-propyl, butyl, iso-butyl, sec-butyl, tert-butyl, pentyl, hexyl and the like. Alkyl groups optionally can be substituted, for example, with hydroxy (OH), halo, aryl, carboxyl, thio, C₃-C₈ cycloalkyl, and amino.

[0075] The term “C₀-Cₙ alkyl” wherein n can be from 1-18, as used herein, represents a branched or linear alkyl group having up to 18 carbon atoms. For example, the term “(C₀-C₆ alkyl)OH” represents a hydroxyl parent moiety attached to an alkyl substituent having up to 6 carbon atoms (e.g. —OH, —CH₂OH, —C₂H₄OH, —C₃H₆OH, —C₄H₈OH, —C₅H₁₀OH, —C₆H₁₂OH).

[0076] The term “C₂-Cₙ alkenyl” wherein n can be from 2 through 18, as used herein, represents an unsaturated branched or linear group having from 2 to the specified number of carbon atoms and at least one double bond. Examples of such groups include, but are not limited to, 1-propenyl, 2-propenyl (—CH₂—CH═CH₂), 1,3-butadienyl, (—CH═CHCH═CH₂), 1-butenyl (—CH═CHCH₂CH₃), hexenyl, pentenyl, and the like. Alkenyl groups optionally can be substituted, for example, with hydroxy (OH), halo, aryl, carboxyl, thio, C₃-C₈ cycloalkyl, and amino.

[0077] The term “C₂-Cₙ, alkynyl” wherein n can be from 2 to 18, refers to an unsaturated branched or linear group having from 2 to n carbon atoms and at least one triple bond. Examples of such groups include, but are not limited to, 1-propynyl, 2-propynyl, 1-butynyl, 2-butynyl, 1-pentynyl, and the like. Alkynyl groups optionally can be substituted, for example, with hydroxy (OH), halo, aryl, carboxyl, thio, C₃-C₈ cycloalkyl, and amino.

[0078] As used herein the term “aryl” refers to a monocyclic or polycyclic (for example, bicyclic, tricyclic, or tetracyclic) aromatic groups. The size of the aryl ring or rings is indicated by designating the number of carbons present. For example, the term “(C₁-C₃ alkyl)(C₆-C₁₀ aryl)” refers to a 6 to 10 membered aryl that is attached to a parent moiety via a one to three membered alkyl chain. Unless otherwise indicated, an aryl group can be unsubstituted or substituted with one or more, and in particular one to five groups independently selected from, for example, halo, alkyl, alkenyl, OCF₃, NO₂, CN, NC, OH, alkoxy, amino, CO₂H, C₃-C₈ cycloalkyl, C(O)Oalkyl, aryl, and heteroaryl. Exemplary aryl groups include, but are not limited to, phenyl, naphthyl, tetrahydronaphthyl, chlorophenyl, indanyl, indenyl, methylphenyl, methoxyphenyl, trifluoromethylphenyl, nitrophenyl, 2,4-methoxychlorophenyl, and the like.

[0079] As used herein, the term “heteroaryl” refers to a monocyclic or polycyclic ring system containing one or more aromatic rings and containing at least one nitrogen, oxygen, or sulfur atom in an aromatic ring. The size of the heteroaryl ring and the presence of substituents or linking groups are indicated by designating the number of carbons present. For example, the term “(C₁-C₆ alkyl)(C₅-C₆ heteroaryl)” refers to a 5 or 6 membered heteroaryl that is attached to a parent moiety via a one to 6 membered alkyl chain. Unless otherwise indicated, a heteroaryl group can be unsubstituted or substituted with one or more, and in particular one to five groups independently selected from, for example, halo, alkyl, alkenyl, OCF₃, NO₂, CN, NC, OH, alkoxy, amino, CO₂H, C₃-C₈ cycloalkyl, C(O)Oalkyl, aryl, and heteroaryl. Examples of heteroaryl groups include, but are not limited to, thienyl, furyl, pyridyl, oxazolyl, quinolyl, thiophenyl, isoquinolyl, indolyl, triazinyl, triazolyl, isothiazolyl, isoxazolyl, imidazolyl, benzothiazolyl, pyrazinyl, pyrimidinyl, thiazolyl, and thiadiazolyl.

[0080] As used herein, the term “heteroalkyl” refers to a linear or branched hydrocarbon containing the indicated number of carbon atoms and at least one heteroatom in the backbone of the structure. Suitable heteroatoms for purposes herein include but are not limited to N, S, and O. Heteroalkyl groups optionally can be substituted, for example, with hydroxy (OH), halo, aryl, carboxyl, and amino.

[0081] As used herein, the term “halogen” or “halo” refers to one or more members of the group consisting of fluorine, chlorine, bromine, and iodine.

[0082] As used herein, the term “glucagon related peptide” refers to those peptides which have biological activity (as agonists or antagonists) at any one or more of the glucagon, GLP-1, GLP-2, and GIP receptors and comprise an amino acid sequence that shares at least 40% sequence identity (e.g., 45%, 50%, 55%, 60%, 65%, 70%, 75%, 80%, 85%, 90%, 95%) with at least one of native glucagon, native oxyntomodulin, native exendin-4, native GLP-1, native GLP-2, or native GIP. Unless otherwise stated, any reference to an amino acid position in a glucagon related peptide (e.g. for linkage of a NHR ligand, a conjugate moiety, a hydrophilic polymer, acylation or alkylation) refers to the corresponding position relative to the native glucagon amino acid sequence (SEQ ID NO: 1601).

[0083] As used herein, the term “selectivity” of a molecule for a first receptor relative to a second receptor refers to the following ratio: EC₅₀ of the molecule at the second receptor divided by the EC₅₀ of the molecule at the first receptor. For example, a molecule that has an EC₅₀ of 1 nM at a first receptor and an EC₅₀ of 100 nM at a second receptor has 100-fold selectivity for the first receptor relative to the second receptor.

[0084] The term “identity” as used herein relates to the similarity between two or more sequences. Identity is measured by dividing the number of identical residues by the total number of residues and multiplying the product by 100 to achieve a percentage. Thus, two copies of exactly the same sequence have 100% identity, whereas two sequences that have amino acid deletions, additions, or substitutions relative to one another have a lower degree of identity. Those skilled in the art will recognize that several computer programs, such as those that employ algorithms such as BLAST (Basic Local Alignment Search Tool, Altschul et al. (1993) J. Mol. Biol. 215:403-410) are available for determining sequence identity.

[0085] As used herein, the term “glucagon superfamily peptide” refers to a group of peptides related in structure in their N-terminal and C-terminal regions (see, for example, Sherwood et al., Endocrine Reviews 21: 619-670 (2000)). Members of this group include all glucagon related peptides, as well as Growth Hormone Releasing Hormone (GHRH; SEQ ID NO: 1619), vasoactive intestinal peptide (VIP; SEQ ID NO: 1620), pituitary adenylate cyclase-activating polypeptide 27 (PACAP-27; SEQ ID NO: 1621), peptide histidine isoleucine (PHI; SEQ ID NO: 1642), peptide histidine methionine (PHM; SEQ ID NO: 1622), Secretin (SEQ ID NO: 1623), and analogs, derivatives or conjugates with up to 1, 2, 3, 4, 5, 6, 7, 8, 9 or 10 amino acid modifications relative to the native peptide. Such peptides preferably retain the ability to interact (agonist or antagonist) with receptors of the glucagon receptor superfamily. Unless otherwise stated, any reference to an amino acid position in a glucagon superfamily peptide (e.g. for linkage of a NHR ligand, a conjugate moiety, a hydrophilic polymer, acylation or alkylation) refers to the corresponding position relative to the native glucagon amino acid sequence (SEQ ID NO: 1601), see FIG. 1 for an alignment of representative glucagon superfamily peptides.

[0086] The term “glucagon agonist peptide” refers to a compound that binds to and activates downstream signaling of the glucagon receptor. However, this term should not be construed as limiting the compound to having activity at only the glucagon receptor. Rather, the glucagon agonist peptides of the present disclosures may exhibit additional activities at other receptors, as further discussed herein. Glucagon agonist peptides, for example, may exhibit activity (e.g., agonist activity) at the GLP-1 receptor and/or the GIP receptor. Also, the term “glucagon agonist peptide” should not be construed as limiting the compound to only peptides. Rather, compounds other than peptides are encompassed by this term. Accordingly, the glucagon agonist peptide in some aspects is a peptide in conjugate form (a heterodimer, a multimer, a fusion peptide), a chemically-derivatized peptide, a pharmaceutical salt of a peptide, a peptidomimetic, and the like.

[0087] The term “GLP-1 agonist peptide” refers to a compound that binds to and activates downstream signaling of the GLP-1 receptor. However, this term should not be construed as limiting the compound to having activity at only the GLP-1 receptor. Rather, the GLP-1 agonist peptides of the present disclosures may exhibit additional activities at other receptors, as further discussed herein. GLP-1 agonist peptides, for example, may exhibit activity (e.g., agonist activity) at the glucagon receptor and/or the GIP receptor. Also, the term “GLP-1 agonist peptide” should not be construed as limiting the compound to only peptides. Rather, compounds other than peptides are encompassed by this term. Accordingly, the GLP-1 agonist peptide in some aspects is a peptide in conjugate form (a heterodimer, a multimer, a fusion peptide), a chemically-derivatized peptide, a pharmaceutical salt of a peptide, a peptidomimetic, and the like.

[0088] The term “GIP agonist peptide” refers to a compound that binds to and activates downstream signaling of the GIP receptor. However, this term should not be construed as limiting the compound to having activity at only the GIP receptor. Rather, the GIP agonist peptides of the present disclosures may exhibit additional activities at other receptors, as further discussed herein. GIP agonist peptides, for example, may exhibit activity (e.g., agonist activity) at the GLP-1 receptor. Also, the term “GIP agonist peptide” should not be construed as limiting the compound to only peptides. Rather, compounds other than peptides are encompassed by this term. Accordingly, the GIP agonist peptide in some aspects is a peptide in conjugate form (a heterodimer, a multimer, a fusion peptide), a chemically-derivatized peptide, a pharmaceutical salt of a peptide, a peptidomimetic, and the like.

[0089] The term “glucagon antagonist peptide” refers to a compound that counteracts glucagon activity or prevents glucagon function. For example, a glucagon antagonist exhibits at least 60% inhibition (e.g., at least 70%, 80%, 90% or more inhibition) of the maximum response achieved by glucagon at the glucagon receptor. In a specific embodiment, the glucagon antagonist at a concentration of about 1 μM exhibits less than about 20% of the maximum agonist activity achieved by glucagon at the glucagon receptor (e.g. less than about 10% or 5%). This term should not be construed as limiting the compound to having activity at only the glucagon receptor. Rather, the glucagon antagonist peptides of the present disclosures may exhibit additional activities at the glucagon receptor (e.g., partial agonism) or other receptor. Glucagon antagonist peptides, for example, may exhibit activity (e.g., agonist activity) at the GLP-1 receptor. Also, the term “glucagon antagonist peptide” should not be construed as limiting the compound to only peptides. Rather, compounds other than peptides are encompassed by these terms. Accordingly, in some aspects, the glucagon agonist peptide is a peptide in conjugate form, a chemically-derivatized peptide, a pharmaceutical salt of a peptide, a peptidomimetic, and the like.

[0090] The term “GLP-1 antagonist peptide” refers to a compound that counteracts GLP-1 activity or prevents GLP-1 function. For example, a GLP-1 antagonist exhibits at least 60% inhibition (e.g., at least 70%, 80%, 90% or more inhibition) of the maximum response achieved by GLP-1 at the GLP-1 receptor. In a specific embodiment, a GLP-1 antagonist at a concentration of about 1 μM exhibits less than about 20% of the maximum agonist activity achieved by GLP-1 at the GLP-1 receptor (e.g. less than about 10% or 5%). The term should not be construed as limiting the compound to having activity at only the GLP-1 receptor. Rather, the GLP-1 antagonist peptides of the present disclosures may exhibit additional activities at the GLP-1 receptor (e.g., partial agonism) or other receptor. GLP-1 antagonist peptides, for example, may exhibit activity (e.g., agonist activity) at the glucagon receptor. Also, the term “GLP-1 antagonist peptide” should not be construed as limiting the compound to only peptides. Rather, compounds other than peptides are encompassed by these terms. Accordingly, in some aspects, the GLP-1 agonist peptide is a peptide in conjugate form, a chemically-derivatized peptide, a pharmaceutical salt of a peptide, a peptidomimetic, and the like.

[0091] The term “GIP antagonist peptide” refers to a compound that counteracts GIP activity or prevents GIP-1 function. For example, a GIP antagonist exhibits at least 60% inhibition (e.g., at least 70%, 80%, 90% or more inhibition) of the maximum response achieved by GIP at the GIP receptor. In a specific embodiment, a GIP antagonist at a concentration of about 1 μM exhibits less than about 20% of the maximum agonist activity achieved by GIP at the GIP receptor (e.g. less than about 10% or 5%). The term should not be construed as limiting the compound to having activity at only the GIP receptor. Rather, the GIP antagonist peptides of the present disclosures may exhibit additional activities at the GIP receptor (e.g., partial agonism) or other receptor. GIP antagonist peptides, for example, may exhibit activity (e.g., agonist activity) at the glucagon receptor. Also, the term “GIP antagonist peptide” should not be construed as limiting the compound to only peptides. Rather, compounds other than peptides are encompassed by these terms. Accordingly, in some aspects, the GIP agonist peptide is a peptide in conjugate form, a chemically-derivatized peptide, a pharmaceutical salt of a peptide, a peptidomimetic, and the like.

[0092] As used herein, the terms “glucagon analog” and “glucagon peptide” can be used interchangeably to refer to an analog of glucagon that has the indicated activity at a glucagon related peptide receptor.

[0093] As used herein the term “native glucagon” refers to a peptide consisting of the sequence of SEQ ID NO: 1601.

[0094] As used herein, the term “native GLP-1” is a generic term that designates GLP-1 (7-36) amide (SEQ ID NO: 1603), GLP-1 (7-37) acid (SEQ ID NO: 1604) or a mixture of those two compounds.

[0095] As used herein, the term “native GIP” refers to a peptide consisting of SEQ ID NO: 1607.

[0096] As used herein, “glucagon potency” or “potency compared to native glucagon” of a molecule refers to the ratio of the EC₅₀ of the molecule at the glucagon receptor divided by the EC₅₀ of native glucagon at glucagon receptor.

[0097] As used herein, “GLP-1 potency” or “potency compared to native GLP-1” of a molecule refers to the ratio of the EC₅₀ of the molecule at GLP-1 receptor divided by the EC₅₀ of native GLP-1 at GLP-1 receptor.

[0098] As used herein, “GIP potency” or “potency compared to native GIP” of a molecule refers to the ratio of the EC₅₀ of the molecule at the GIP receptor divided by the EC₅₀ of native GIP at the GIP receptor.

[0099] As used herein, “NHR ligand” refers to a hydrophobic or lipophilic moiety that has biological activity (either agonist or antagonist) at a nuclear hormone receptor (NHR). The NHR ligand is wholly or partly non-peptidic. In some embodiments, the NHR ligand is an agonist that binds to and activates the NHR. In other embodiments, the NHR ligand is an antagonist. In some embodiments, the NHR ligand is an antagonist that acts by wholly or partially blocking binding of native ligand to the active site. In other embodiments, the NHR ligand is an antagonist that acts by binding to the active site or an allosteric site and preventing activation of, or de-activating, the NHR.

[0100] As used herein, “nuclear hormone receptors” (NHRs) refers to ligand-activated proteins that regulate gene expression within the cell nucleus, sometimes in concert with other co-activators and co-repressors.

[0101] As used herein, “steroids and derivatives thereof” refers to compounds, either naturally occurring or synthesized, having a structure of Formula A:

[chemical structure]

wherein R¹ and R², when present, are independently moieties that permit or promote agonist or antagonist activity upon binding of the compound of Formula A to a nuclear hormone receptor; R³ and R⁴ are independently moieties that permit or promote agonist or antagonist activity upon binding of the compound of Formula A to a nuclear hormone receptor; and each dashed line represents an optional double bond. Formula A may further comprise one or more substituents at one or more of positions 1, 2, 3, 4, 5, 6, 7, 8, 9, 11, 12, 14, 15, 16, and 17. Contemplated optional substituents include, but are not limited to, OH, NH₂, ketone, and C₁-C₁₈ alkyl groups. Specific, nonlimiting examples of steroids and derivatives thereof include cholesterol, cholic acid estradiol, testosterone, and hydrocortisone.

[0102] As used herein, “bile acids and derivatives thereof” refers to compounds, either naturally occurring or synthesized, of Formula M:

[chemical structure]

wherein each of R¹⁵, R¹⁶, and R¹⁷ are independently moieties that permit or promote agonist or antagonist activity upon binding of the compound of Formula M to a nuclear hormone receptor. In some embodiments, each of R¹⁵ and R¹⁶ are independently hydrogen, (C₀-C₈ alkyl)halo, C₁-C₁₈ alkyl, C₂-C₁₈ alkenyl, C₂-C₁₈ alkynyl, heteroalkyl, or (C₀-C₈ alkyl)OH; and R¹⁷ is OH, (C₀-C₈ alkyl)NH(C₁-C₄ alkyl)SO₃H, or (C₀-C₈ alkyl)NH(C₁-C₄ alkyl)COOH. Formula M may further comprise one or more substituents at one or more of positions 1, 2, 3, 4, 5, 6, 7, 8, 9, 11, 12, 14, 15, 16, and 17. Nonlimiting examples of bile acids include cholic acid, deoxycholic acid, lithocholic acid, chenodeoxycholic acid, taurocolic acid, and glycocholic acid.

[0103] As used herein, “cholesterol and derivatives thereof” refers to compounds, either naturally occurring or synthesized, comprising a structure similar to that of cholesterol, as shown below:

[chemical structure]

Derivatives of cholesterol can include oxysterols, such as hydroxycholesterol, 24(S)-hydroxycholesterol, 27-hydroxycholesterol, and cholestenoic acid.

[0104] As used herein, “estradiol and derivatives thereof” refers to compounds, either naturally occurring or synthesized, of Formula B:

[chemical structure]

wherein R¹, R⁵ and R⁶ are moieties that permit or promote agonist or antagonist activity upon binding of the compound of Formula B to the estrogen receptor. In some embodiments, the structure of Formula B is substituted with one or more substituents at one or more positions of the tetracyclic ring, such as, for example, positions 1, 2, 4, 6, 7, 8, 9, 11, 12, 14, 15, 16, and 17. In some cases, the substituent comprises a ketone at position-6.

[chemical structure]

Specific, nonlimiting examples of derivatives of estradiol include β-estradiol 17-acetate, β-estradiol 17-cypionate, β-estradiol 17-enanthate, β-estradiol 17-valerate, β-estradiol 3,17-diacetate, β-estradiol 3,17-dipropionate, β-estradiol 3-benzoate, β-estradiol 3-benzoate 17-n-butyrate, β-estradiol 3-glycidyl ether, β-estradiol 3-methyl ether, β-estradiol 6-one, β-estradiol 3-glycidyl, β-estradiol 6-one 6-(O-carboxymethyloxime), 16-epiestriol, 17-epiestriol, 2-methoxy estradiol, 4-methoxy estradiol, estradiol 17-phenylpropionate, and 17β-estradiol 2-methyl ether, 17α-ethynylestradiol, megestrol acetate, and estriol.

[0105] As used herein, “testosterone and derivatives thereof” refers to compounds, either naturally occurring or synthesized, of Formula F:

[chemical structure]

wherein R¹, when present, R², R³ and R⁶ are each independently a moiety that permits or promotes agonist or antagonist activity upon binding of the compound of Formula F to a nuclear hormone receptor; and each dashed line represents an optional double bond, with the proviso that no more than one of the optional carbon-carbon double bond is present at position 5. In some embodiments, the structure of Formula F is substituted with one or more substituents at one or more positions of the tetracyclic ring, such as, for example, positions 1, 2, 3, 4, 5, 6, 7, 8, 9, 11, 12, 14, 15, 16, and 17. Specific, nonlimiting examples of derivatives of testosterone include dehydroepiandrosterone, androstenedione, 5-androstenediol, androsterone, and dihydrotestosterone.

[0106] As used herein, “fatty acids and derivatives thereof” refers to carboxylic acids comprising a long unbranched C₁ to C₂₈ alkyl or C₂ to C₂₈ alkenyl moiety and can optionally comprise one or more halo substituents and/or optionally comprise one or more substituents other than halo. In some embodiments, the long unbranched alkyl or alkenyl moiety can be wholly halo substituted (e.g., all hydrogens replaced with halo atoms). A short chain fatty acid comprises 1-5 carbon atoms. A medium chain fatty acid comprises 6-12 carbon. A long chain fatty acid comprises 13-22 carbon atoms. A very long chain fatty acid comprises 23-28 carbon atoms. Specific, nonlimiting examples of fatty acids include formic acid, acetic acid, n-caproic acid, heptanoic acid, caprylic acid, nonanoic acid, capric acid, undecanoic acid, lauric acid, tridecanoic acid, myristic acid, pentadeconoic acid, palmitic acid, heptadecanoic acid, stearic acid, nonadecanoic acid, arachidic acid, heneicosanoic acid, behenic acid, tricosanoic acid, mead acid, myristoleic acid, palmitoleic acid, sapienic acid, oleic acid, linoleic acid, α-linolenic acid, elaidic acid, petroselinic acid, arachidonic acid, dihydroxyeicosatetraenoic acid (DiHETE), octadecynoic acid, eicosatriynoic acid, eicosadienoic acid, eicosatrienoic acid, eicosapentaenoic acid, erucic acid, dihomolinolenic acid, docosatrienoic acid, docosapentaenoic acid, docosahexaenoic acid, and adrenic acid.

[0107] As used herein, “cortisol and derivatives thereof” refers to compounds, either naturally occurring or synthesized, of Formula C:

[chemical structure]

wherein R², R³, R⁶, R⁷, R⁸, R⁹, and R¹⁰ are each independently moieties that permit or promote agonist or antagonist activity upon the binding of the compound of Formula C to a nuclear hormone receptor; and each dash represents an optional double bond. In some embodiments, the structure of Formula C is substituted with one or more substituents at one or more positions of the tetracyclic ring, such as, for example, positions 1, 2, 4, 5, 6, 7, 8, 11, 12, 14, and 15. Specific, nonlimiting examples of derivatives of cortisol and derivatives thereof include cortisol, cortisone acetate, beclometasone, prednisone, prednisolone, methylprednisolone, betamethasone, trimcinolone, and dexamethasone.

[0108] As used herein, “linking group” is a molecule or group of molecules that binds two separate entities to one another. Linking groups may provide for optimal spacing of the two entities or may further supply a labile linkage that allows the two entities to be separated from each other. Labile linkages include hydrolyzable groups, photocleavable groups, acid-labile moieties, base-labile moieties and enzyme cleavable groups.

[0109] As used herein, the term “prodrug” is defined as any compound that undergoes chemical modification before exhibiting its full pharmacological effects.

[0110] As used herein, a “dipeptide” is the result of the linkage of an α-amino acid or α-hydroxyl acid to another amino acid, through a peptide bond.

[0111] As used herein the term “chemical cleavage” absent any further designation encompasses a non-enzymatic reaction that results in the breakage of a covalent chemical bond.

### Embodiments

[0112] The present disclosures provide glucagon superfamily peptides conjugated with NHR ligands. In some aspects, the NHR ligands are capable of acting at nuclear hormone receptors involved in metabolism or glucose homeostasis, and the conjugate provides superior biological effects on metabolism or glucose homeostasis compared to the peptide alone or the NHR ligand alone. Without being bound by a theory of the invention, the NHR ligand may serve to target the glucagon superfamily peptide to particular types of cells or tissues; or alternatively the glucagon superfamily peptide may serve to target the NHR ligand or enhance its transport into the cell, e.g. through binding of peptide to a receptor that internalizes the conjugate.

[0113] The glucagon superfamily peptide conjugates of the invention can be represented by the following formula:

Q-L-Y

wherein Q is a glucagon superfamily peptide, Y is a NHR ligand, and L is a linking group or a bond.

[0114] The glucagon superfamily peptide (Q) in some embodiments can be a glucagon related peptide that exhibits agonist activity at the glucagon receptor, agonist activity at the GLP-1 receptor, agonist activity at the GIP receptor, co-agonist activity at the glucagon and GLP-1 receptors, co-agonist activity at the glucagon and GIP receptors, co-agonist activity at the GLP-1 and GIP receptors, or tri-agonist activity at the glucagon, GIP, and GLP-1 receptors. In some embodiments, the glucagon related peptide exhibits antagonist activity at the glucagon, GLP-1 or GIP receptor.

[0115] The glucagon superfamily peptide (Q) in some embodiments may be a glucagon-related peptide, Growth Hormone Releasing Hormone (GHRH; SEQ ID NO: 1619), vasoactive intestinal peptide (VIP; SEQ ID NO: 1620), Pituitary adenylate cyclase-activating polypeptide 27 (PACAP-27; SEQ ID NO: 1621), peptide histidine methionine (PHM; SEQ ID NO: 1622), or Secretin (SEQ ID NO: 1623), and/or and analogs, derivatives and conjugates thereof. Glucagon superfamily peptides may have common structural characteristics, including but not limited to homology within the N-terminal amino acids and/or alpha-helical structure within the C-terminal portion. It is believed that the C-terminus generally functions in receptor binding and the N-terminus generally functions in receptor signaling. A few amino acids in the N-terminal portion and C-terminal portion are highly conserved among members of the glucagon superfamily, for example, His1, Gly4, Phe6, Phe22, Val23, Trp25, and Leu26, with amino acids at these positions showing identity, conservative substitutions or similarity in amino acid side chains. In some embodiments the glucagon related peptide Q is glucagon (SEQ ID NO: 1601), oxyntomodulin (SEQ ID NO: 1606), exendin-4 (SEQ ID NO: 1618), Glucagon-like peptide-1 (GLP-1) (amino acids 7-37 provided as SEQ ID NOs: 1603 and 1604), Glucagon-like peptide-2 (GLP-2) (SEQ ID NO: 1608), GIP (SEQ ID NO: 1607) or analogs, derivatives and conjugates of the foregoing. In some embodiments Q as a glucagon related peptide comprises an amino acid sequence that is at least about 40%, 45%, 50%, 55%, 60%, 65%, 70%, 75%, 80%, 85%, 90%, or 95% identical to the corresponding sequence of native glucagon, native oxyntomodulin, native exendin-4, native (7-37)GLP-1, native GLP-2, or native GIP over the length of the native peptide (or over the positions which correspond to glucagon, see e.g., FIG. 1). In other embodiments, a glucagon superfamily peptide (Q) comprises an amino acid sequence of native glucagon, native exendin-4, native (7-37)GLP-1, native GLP-2, native GHRH, native VIP, native PACAP-27, native PHM, native oxyntomodulin, native secretin, or native GIP with up to 1, 2, 3, 4, 5, 6, 7, 8, 9 or 10 amino acid modifications. In still further embodiments, Q comprises an amino acid sequence which is a chimera of two or more native glucagon related peptide sequences. In some embodiments, Q comprises an amino acid sequence at least about 50% identical to native glucagon (SEQ ID NO: 1601) that retains the alpha-helix conformation of the amino acids corresponding to amino acids 12-29.

[0116] In related aspects, the invention provides peptide conjugates represented by the formula

Q-L-Y

wherein Q is osteocalcin, calcitonin, amylin, or an analog, derivative or conjugate thereof, rather than a glucagon superfamily peptide; Y is a NHR ligand; and L is a linking group or a bond. In some embodiments, Q comprises osteocalcin (SEQ ID NO: 1644), or an amino acid sequence that is at least about 40%, 45%, 50%, 55%, 60%, 65%, 70%, 75%, 80%, 85%, 90%, or 95% identical to native osteocalcin over the length of the native peptide. Q may comprise an analog of osteocalcin with up to 1, 2, 3, 4, 5, 6, 7, 8, 9 or 10 amino acid modifications relative to native osteocalcin, or a truncated analog of osteocalcin (e.g., amino acids 70-84) with up to 1, 2, 3, 4, 5, 6, 7, 8, 9 or 10 amino acid modifications relative to the native truncated osteocalcin. In some embodiments, Q comprises calcitonin (SEQ ID NO: 1645), or an amino acid sequence that is at least about 40%, 45%, 50%, 55%, 60%, 65%, 70%, 75%, 80%, 85%, 90%, or 95% identical to native calcitonin over the length of the native peptide. Q may comprise an analog of calcitonin with up to 1, 2, 3, 4, 5, 6, 7, 8, 9 or 10 amino acid modifications relative to native calcitonin. In some embodiments, Q comprises amylin (SEQ ID NO: 1646), or an amino acid sequence that is at least about 40%, 45%, 50%, 55%, 60%, 65%, 70%, 75%, 80%, 85%, 90%, or 95% identical to native amylin over the length of the native peptide. Q may comprise an analog of amylin with up to 1, 2, 3, 4, 5, 6, 7, 8, 9 or 10 amino acid modifications relative to native amylin.

### The NHR Ligand (Y)

[0117] In the present disclosures relating to Q-L-Y conjugates, Y is a ligand that acts at any nuclear hormone receptor, including any one of the “nuclear hormone receptor superfamily” (NHR superfamily) set forth in Table 1, or a class or subgroup thereof. This NHR superfamily is composed of structurally related proteins found within the interior of cells that regulate the transcription of genes. These proteins include receptors for steroid and thyroid hormones, vitamins, and other “orphan” proteins for which no ligands have been found. Nuclear hormone receptors generally include at least one of a C4-type zinc finger DNA-Binding Domain (DBD) and/or a Ligand Binding Domain (LBD). The DBD functions to bind DNA in the vicinity of target genes, and the LBD binds and responds to its cognate hormone. “Classical Nuclear Hormone Receptors” possess both a DBD and a LBD (e.g. Estrogen receptor alpha), while other nuclear hormone receptors possess only a DBD (e.g. Knirps, ORD) or only a LBD (e.g. Short Heterodimer Partner (SHP)).

[0118] Nuclear hormone receptors can be divided into four mechanistic classes: Type I, Type II, Type III, and Type IV. Ligand binding to Type I receptors (NR3 Group) results in the dissociation of heat shock proteins (HSP) from the receptor, homodimerization of the receptor, translocation from the cytoplasm into the cell nucleus, and binding to inverted repeat hormone response elements (HRE's) of DNA. The nuclear receptor/DNA complex then recruits other proteins which transcribe DNA downstream from the HRE into messenger RNA. Type II receptors (NR1 Group) are retained in the nucleus and bind as heterodimers, usually with Retinoid X Receptors (RXR), to DNA. Type II nuclear hormone receptors are often complexed with corepressor proteins. Ligand binding to the Type II receptor causes dissociation of the corepressor and recruitment of coactivator proteins. Additional proteins are recruited to the nuclear receptor/DNA complex, which transcribe DNA into messenger RNA. Type III nuclear hormone receptors (NR2 Group) are orphan receptors that bind to direct repeat HRE's of DNA as homodimers. Type IV nuclear hormone receptors bind to DNA either as monomers or dimers. Type IV receptors are unique because a single DNA binding domain of the receptor binds to a single half site HRE. The NHR ligand can be a ligand that acts at any one or more of the Type I, Type II, Type III or Type IV nuclear hormone receptors (e.g. as an agonist or antagonist).

TABLE 1
Nuclear Hormone Receptor Superfamily

| | | | |
|---|---|---|---|
| | | | Endogenous |
| Nuclear Hormone Receptor | Species | Accession | Ligand |

NR1 Group

| | | | | |
|---|---|---|---|---|
| NR1A1 | Thyroid Hormone Receptor alpha (TRα) | Human | M24748 | Thyroid hormone |
| NR1A2 | Thyroid Hormone Receptor beta (TRβ) | Human | X04707 | |
| NR1B1 | Retinoic Acid Receptor alpha (RARα) | Human | X06538 | Vitamin A and |
| NR1B2 | Retinoic Acid Receptor beta (RARβ) | Human | Y00291 | related compounds |
| NR1B3 | Retinoic Acid Receptor gamma (RARγ) | Human | M57707 | |
| NR1C1 | Peroxisome Proliferator Activated Receptor alpha (PPARα) | Human | L02932 | Fatty acids, |
| NR1C2 | Peroxisome Proliferator Activated Receptor | Human | L07592 | prostaglandins |
| | beta/delta (PPARβ/δ) | | | |
| NR1C3 | Peroxisome Proliferator Activated Receptor gamma | Human | L40904 | |
| | (PPARγ) | | | |
| NR1D1 | Rev-ErbAα | Human | M24898 | Heme |
| NR1D2 | Rev-ErbAβ | Human | L31785 | |
| NR1F1 | RAR-related Orphan Receptor alpha (RORα) | Human | U04897 | Cholesterol, all- |
| NR1F2 | RAR-related Orphan Receptor beta (RORβ) | Human | Y08639 | trans retinoic acid |
| NR1F3 | RAR-related Orphan Receptor gamma (RORγ) | Human | U16997 | |
| NR1H2 | Liver X Receptor beta (LXRβ) | Human | U07132 | Oxysterol |
| NR1H3 | Liver X Receptor alpha (LXRα) | Human | U22622 | |
| NR1H4 | Farnesoid X Receptor (FXR) | Human | U68233 | |
| NR1I1 | Vitamin D Receptor (VDR) | Human | J03258 | Vitamin D |
| NR1I2 | Pregnane X Receptor (PXR) | Human | AF061056 | Xenobiotics |
| | | | | (dexamethasone, |
| | | | | rifapicin) |
| NR1I3 | Constitutive Androstane Receptor alpha (CARα) | Human | Z30425 | Androstane |

NR2 Group

| | | | | |
|---|---|---|---|---|
| NR2A1 | Hepatocyte Nuclear Factor 4 alpha (HNF4α) | Human | X76930 | Fatty acids |
| NR2A3 | Hepatocyte Nuclear Factor 4 gamma (HNF4γ) | Human | Z49826 | Fatty acids |
| NR2B1 | Retinoid X Receptor alpha (RXRα) | Human | X52773 | Retinoids |
| NR2B2 | Retinoid X Receptor beta (RXRβ) | Human | M84820 | |
| NR2B3 | Retinoid X Receptor gamma (RXRγ) | Human | U38480 | |
| NR2C1 | Testicular Receptor 2 (TR2) | Human | M29960 | |
| NR2C2 | Testicular Receptor 4 (TR4) | Human | L27586 | |
| NR2E1 | Human homologue of the Drosophila tailless gene (TLX) | Human | Y13276 | |
| NR2E3 | Photoreceptor-specific Nuclear Receptor (PNR) | Human | AF121129 | |
| NR2F1 | Chicken ovalbumin upstream promoter- | Human | X12795 | |
| | transcription factor I (COUP-TFI) | | | |
| NR2F2 | Chicken ovalbumin upstream promoter- | Human | M64497 | |
| | transcription factor II (COUP-TFII) | | | |
| NR2F6 | V-erAA-Related Gene (EAR2) | Human | X12794 | |

NR3 Group

| | | | | |
|---|---|---|---|---|
| NR3A1 | Estrogen Receptor alpha (ERα) | Human | P03372 | Estrogen |
| NR3A2 | Estrogen Receptor beta (ERβ) | Human | AB006590 | |
| NR3B1 | Estrogen Receptor Related alpha (ERRα) | Human | X51416 | |
| NR3B2 | Estrogen Receptor Related beta (ERRβ) | Human | AF094517 | |
| NR3B3 | Estrogen Receptor Related gamma (ERRγ) | Human | AF058291 | |
| NR3C1 | Glucocorticoid Receptor (GR) | Human | X03225 | Cortisol |
| NR3C2 | Mineralocorticoid Receptor (MR) | Human | M16801 | Aldosterone |
| NR3C3 | Progesterone Receptor (PR) | Human | M15716 | Progesterone |
| NR3C4 | Androgen Receptor (AR) | Human | M20132 | Testosterone |

NR4 Group

| | | | |
|---|---|---|---|
| NR4A1 | Nerve Growth Factor IB alpha (NGFI-Bα) | Human | L13740 |
| NR4A2 | Nerve Growth Factor IB beta (NGFI-Bβ) | Human | X75918 |
| NR4A3 | Nerve Growth Factor IB gamma (NGFI-Bγ) | Human | D78579 |

NR5 Group

| | | | |
|---|---|---|---|
| NR5A1 | Steroidogenic Factor 1 (SF1) | Human | U76388 |
| NR5A2 | Liver Receptor Homolog-1 (LRH-1) | Human | U93553 |

NR6 Group

| | | | |
|---|---|---|---|
| NR6A1 | Germ Cell Nuclear Factor (GCNF) | Human | U64876 |

NR0B Subgroup (have only LBD, no DBD)

| | | | |
|---|---|---|---|
| NR0B1 | DAX1 | Human | S74720 |
| NR0B2 | Short Heterodimer Partner (SHP) | Human | L76571 |

Table data is taken from Laudet and Gronemeyer “The Nuclear Receptor Facts Book,” Academic Press. Class ID refers to a classification code for each member, and accession refers to the NCBI GenBank nucleotide accession code.

### Activity of the NHR Ligand (Y)

[0119] In some embodiments, Y exhibits an EC₅₀ for nuclear hormone receptor activation (or in the case of an antagonist, an IC₅₀) of about 10 mM or less, or 1 mM (1000 μM) or less (e.g., about 750 μM or less, about 500 μM or less, about 250 μM or less, about 100 μM or less, about 75 μM or less, about 50 μM or less, about 25 μM or less, about 10 μM or less, about 7.5 μM or less, about 6 μM or less, about 5 μM or less, about 4 μM or less, about 3 μM or less, about 2 μM or less or about 1 μM or less). In some embodiments, Y exhibits an EC₅₀ or IC₅₀ at a nuclear hormone receptor of about 1000 nM or less (e.g., about 750 nM or less, about 500 nM or less, about 250 nM or less, about 100 nM or less, about 75 nM or less, about 50 nM or less, about 25 nM or less, about 10 nM or less, about 7.5 nM or less, about 6 nM or less, about 5 nM or less, about 4 nM or less, about 3 nM or less, about 2 nM or less or about 1 nM or less). In some embodiments, Y has an EC₅₀ or IC₅₀ at a nuclear hormone receptor which is in the picomolar range. Accordingly, in some embodiments, Y exhibits an EC₅₀ or IC₅₀ at a nuclear hormone receptor of about 1000 pM or less (e.g., about 750 pM or less, about 500 pM or less, about 250 pM or less, about 100 pM or less, about 75 pM or less, about 50 pM or less, about 25 pM or less, about 10 pM or less, about 7.5 pM or less, about 6 pM or less, about 5 pM or less, about 4 pM or less, about 3 pM or less, about 2 pM or less or about 1 pM or less).

[0120] In some embodiments, Y exhibits an EC₅₀ or IC₅₀ at a nuclear hormone receptor that is about 0.001 pM or more, about 0.01 pM or more, or about 0.1 pM or more. Nuclear hormone receptor activation (nuclear hormone receptor activity) can be measured in vitro by any assay known in the art. For example, the activity at the nuclear hormone receptor can be measured by expressing the receptor in yeast cells also harboring a reporter gene (e.g., lacZ which encodes β-galactosidase) under the control of a hormone-responsive promoter. Thus, in the presence of a ligand that acts at the receptor, the reporter gene is expressed and the activity of the reporter gene product can be measured (e.g., by measuring the activity of β-galactosidase in breaking down a chromogenic substrate, such as chlorophenol red-β-D-galactopyranoside (CPRG), which is initially yellow, into a red product that can be measured by absorbance). See, e.g., Jungbauer and Beck, J. Chromatog. B, 77: 167-178 (2002); Routledge and Sumpter, J. Biol. Chem., 272: 3280-3288 (1997); Liu et al., J. Biol. Chem., 274: 26654-26660 (1999). Binding of the NHR ligand to the nuclear hormone receptor can be determined using any binding assay known in the art such as, for example, fluorescence polarization or a radioactive assay. See, e.g., Ranamoorthy et al., 138(4): 1520-1527 (1997).

[0121] In some embodiments, Y exhibits about 0.001% or more, about 0.01% or more, about 0.1% or more, about 0.5% or more, about 1% or more, about 5% or more, about 10% or more, about 20% or more, about 30% or more, about 40% or more, about 50% or more, about 60% or more, about 75% or more, about 100% or more, about 125% or more, about 150% or more, about 175% or more, about 200% or more, about 250% or more, about 300% or more, about 350% or more, about 400% or more, about 450% or more, or about 500% or higher activity at the nuclear hormone receptor relative to the native nuclear hormone (nuclear hormone potency). In some embodiments, Y exhibits about 5000% or less or about 10,000% or less activity at the nuclear hormone receptor relative to native nuclear hormone. The activity of Y at a receptor relative to a native ligand of the receptor is calculated as the inverse ratio of EC₅₀s for Y versus the native ligand. In some embodiments, Y is the native ligand of the receptor.

### Structure of the NHR Ligand (Y)

[0122] The NHR ligand of the invention (Y) is partly or wholly non-peptidic and is hydrophobic or lipophilic. In some embodiments, the NHR ligand has a molecular weight that is about 5000 daltons or less, or about 4000 daltons or less, or about 3000 daltons or less, or about 2000 daltons or less, or about 1750 daltons or less, or about 1500 daltons or less, or about 1250 daltons or less, or about 1000 daltons or less, or about 750 daltons or less, or about 500 daltons or less, or about 250 daltons or less. The structure of Y can be in accordance with any of the teachings disclosed herein.

[0123] In the embodiments described herein, Y is conjugated to L (e.g. when L is a linking group) or Q (e.g. when L is a bond) at any position of Y that is capable of reacting with Q or L. One skilled in the art could readily determine the position and means of conjugation in view of general knowledge and the disclosure provided herein.

[0124] In any of the embodiments described herein wherein Y comprises a tetracyclic skeleton having three 6-membered rings joined to one 5-membered ring or a variation thereof (e.g. a Y that acts at the vitamin D receptor), the carbon atoms of the skeleton are referred to by position number, as shown below:

[chemical structure]

For example, a modification having a ketone at position-6 refers to the following structure:

[chemical structure]

NHR Ligand that Acts on a Type I Nuclear Hormone Receptor

[0125] In some embodiments of the invention, the NHR ligand (Y) acts on a Type I nuclear hormone receptor. In some embodiments, Y can have any structure that permits or promotes agonist activity upon binding of the ligand to a Type I nuclear hormone receptor, while in other embodiments Y is an antagonist of the Type I nuclear hormone receptor.

[0126] In exemplary embodiments, Y comprises a structure as shown in Formula A:

[chemical structure]

wherein R¹ and R², when present, are independently moieties that permit or promote agonist or antagonist activity upon binding of the compound of Formula A to the Type I nuclear hormone receptor; R³ and R⁴ are independently moieties that permit or promote agonist or antagonist activity upon binding of the compound of Formula A to the Type I nuclear hormone receptor; and each dashed line represents an optional double bond. Formula A may further comprise one or more substituents at one or more of positions 1, 2, 3, 4, 5, 6, 7, 8, 9, 11, 12, 14, 15, 16, 17, 18, and 19. Contemplated optional substituents include, but are not limited to, OH, NH₂, ketone, and C₁-C₁₈ alkyl groups.

[0127] In some embodiments, Y comprises a structure of Formula A wherein

[0128] R¹ is present and is hydrogen, C₁-C₁₈ alkyl, C₂-C₁₈ alkenyl, C₂-C₁₈ alkynyl, heteroalkyl, (C₀-C₈ alkyl)aryl, (C₀-C₈ alkyl)heteroaryl, (C₀-C₈ alkyl)C(O)C₁-C₁₈ alkyl, (C₀-C₈ alkyl)C(O)C₂-C₁₈ alkenyl, (C₀-C₈ alkyl)C(O)C₂-C₁₈ alkynyl, (C₀-C₈ alkyl)C(O)H, (C₀-C₈ alkyl)C(O)aryl, (C₀-C₈ alkyl)C(O)heteroaryl, (C₀-C₈ alkyl)C(O)OC₁-C₁₈ alkyl, (C₀-C₈ alkyl)C(O)OC₂-C₁₈ alkenyl, (C₀-C₈ alkyl)C(O)OC₂-C₁₈ alkynyl, (C₀-C₈ alkyl)C(O)OH, (C₀-C₈ alkyl)C(O)O aryl, (C₀-C₈ alkyl)C(O)O heteroaryl, (C₀-C₈ alkyl)C(O)NR²⁴C₁-C₁₈ alkyl, (C₀-C₈ alkyl)C(O)NR²⁴C₂-C₁₈ alkenyl, (C₀-C₈ alkyl)C(O)NR²⁴C₂-C₁₈ alkynyl, (C₀-C₈ alkyl)C(O)NR²⁴H₂, (C₀-C₈ alkyl)C(O)NR²⁴aryl, (C₀-C₈ alkyl)C(O)NR²⁴heteroaryl, or SO₃H;

[0129] R² is present and is hydrogen, (C₀-C₈ alkyl)halo, C₁-C₁₈ alkyl, C₂-C₁₈ alkenyl, C₂-C₁₈ alkynyl, heteroalkyl, (C₀-C₈ alkyl)aryl, (C₀-C₈ alkyl)heteroaryl, (C₀-C₈ alkyl)OC₁-C₁₈ alkyl, (C₀-C₈ alkyl)OC₂-C₁₈ alkenyl, (C₀-C₈ alkyl)OC₂-C₁₈ alkynyl, (C₀-C₈ alkyl)OH, (C₀-C₈ alkyl)SH, (C₀-C₈ alkyl)NR²⁴C₁-C₁₈ alkyl, (C₀-C₈ alkyl)NR²⁴C₂-C₁₈ alkenyl, (C₀-C₈ alkyl)NR²⁴C₂-C₁₈ alkynyl, (C₀-C₈ alkyl)NR²⁴H₂, (C₀-C₈ alkyl)C(O)C₁-C₁₈ alkyl, (C₀-C₈ alkyl)C(O)C₂-C₁₈ alkenyl, (C₀-C₈ alkyl)C(O)C₂-C₁₈ alkynyl, (C₀-C₈ alkyl)C(O)H, (C₀-C₈ alkyl)C(O)aryl, (C₀-C₈ alkyl)C(O)heteroaryl, (C₀-C₈ alkyl)C(O)OC₁-C₁₈ alkyl, (C₀-C₈ alkyl)C(O)OC₂-C₁₈ alkenyl, (C₀-C₈ alkyl)C(O)OC₂-C₁₈ alkynyl, (C₀-C₈ alkyl)C(O)OH, (C₀-C₈ alkyl)C(O)O aryl, (C₀-C₈ alkyl)C(O)O heteroaryl, (C₀-C₈ alkyl)OC(O)C₁-C₁₈ alkyl, (C₀-C₈ alkyl)OC(O)C₂-C₁₈ alkenyl, (C₀-C₈ alkyl)OC(O)C₂-C₁₈ alkynyl, (C₀-C₈ alkyl)C(O)NR²⁴C₁-C₁₈ alkyl, (C₀-C₈ alkyl)C(O)NR²⁴C₂-C₁₈ alkenyl, (C₀-C₈ alkyl)C(O)NR²⁴C₂-C₁₈ alkynyl, (C₀-C₈ alkyl)C(O)NR²⁴H₂, (C₀-C₈ alkyl)C(O)NR²⁴aryl, (C₀-C₈ alkyl)C(O)NR²⁴heteroaryl, (C₀-C₈ alkyl)NR²⁴C(O)C₁-C₁₈ alkyl, (C₀-C₈ alkyl)NR²⁴C(O)C₂-C₈ alkenyl, or (C₀-C₈ alkyl)NR²⁴C(O)C₂-C₁₈ alkynyl, (C₀-C₈ alkyl)NR²⁴C(O)OH, (C₀-C₈ alkyl)OC(O)OC₁-C₁₈ alkyl, (C₀-C₈ alkyl)OC(O)OC₂-C₁₈ alkenyl, (C₀-C₈ alkyl)OC(O)OC₂-C₁₈ alkynyl, (C₀-C₈ alkyl)OC(O)OH, (C₀-C₈ alkyl)OC(O)NR²⁴C₁-C₁₈ alkyl, (C₀-C₈ alkyl)OC(O)NR²⁴C₂-C₁₈ alkenyl, (C₀-C₈ alkyl)OC(O)NR²⁴C₂-C₁₈ alkynyl, (C₀-C₈ alkyl)OC(O)NR²⁴H₂, (C₀-C₈ alkyl)NR²⁴(O)OC₁-C₁₈ alkyl, (C₀-C₈ alkyl)NR²⁴(O)OC₂-C₁₈ alkenyl, (C₀-C₈ alkyl)NR²⁴(O)OC₂-C₁₈ alkynyl, or (C₀-C₈ alkyl)NR²⁴(O)OH;

[0130] R³ is hydrogen, (C₀-C₈ alkyl)halo, C₁-C₁₈ alkyl, C₂-C₁₈ alkenyl, C₂-C₁₈ alkynyl, heteroalkyl, (C₀-C₈ alkyl)aryl, (C₀-C₈ alkyl)heteroaryl, (C₀-C₈ alkyl)OC₁-C₁₈ alkyl, (C₀-C₈ alkyl)OC₂-C₁₈ alkenyl, (C₀-C₈ alkyl)OC₂-C₁₈ alkynyl, (C₀-C₈ alkyl)OH, (C₀-C₈ alkyl)SH, (C₀-C₈ alkyl)NR²⁴C₁-C₁₈ alkyl, (C₀-C₈ alkyl)NR²⁴C₂-C₁₈ alkenyl, (C₀-C₈ alkyl)NR²⁴C₂-C₁₈ alkynyl, (C₀-C₈ alkyl)NR²⁴H₂, (C₀-C₈ alkyl)C(O)C₁-C₁₈ alkyl, (C₀-C₈ alkyl)C(O)C₂-C₁₈ alkenyl, (C₀-C₈ alkyl)C(O)C₂-C₁₈ alkynyl, (C₀-C₈ alkyl)C(O)H, (C₀-C₈ alkyl)C(O)aryl, (C₀-C₈ alkyl)C(O)heteroaryl, (C₀-C₈ alkyl)C(O)OC₁-C₁₈ alkyl, (C₀-C₈ alkyl)C(O)OC₂-C₁₈ alkenyl, (C₀-C₈ alkyl)C(O)OC₂-C₁₈ alkynyl, (C₀-C₈ alkyl)C(O)OH, (C₀-C₈ alkyl)C(O)O aryl, (C₀-C₈ alkyl)C(O)O heteroaryl, (C₀-C₈ alkyl)OC(O)C₁-C₁₈ alkyl, (C₀-C₈ alkyl)OC(O)C₂-C₁₈ alkenyl, (C₀-C₈ alkyl)OC(O)C₂-C₁₈ alkynyl, (C₀-C₈ alkyl)C(O)NR²⁴C₁-C₁₈ alkyl, (C₀-C₈ alkyl)C(O)NR²⁴C₂-C₁₈ alkenyl, (C₀-C₈ alkyl)C(O)NR²⁴C₂-C₁₈ alkynyl, (C₀-C₈ alkyl)C(O)NR²⁴H₂, (C₀-C₈ alkyl)C(O)NR²⁴aryl, (C₀-C₈ alkyl)C(O)NR²⁴heteroaryl, (C₀-C₈ alkyl)NR²⁴C(O)C₁-C₁₈ alkyl, (C₀-C₈ alkyl)NR²⁴C(O)C₂-C₈ alkenyl, or (C₀-C₈ alkyl)NR²⁴C(O)C₂-C₁₈ alkynyl, (C₀-C₈ alkyl)NR²⁴C(O)OH, (C₀-C₈ alkyl)OC(O)OC₁-C₁₈ alkyl, (C₀-C₈ alkyl)OC(O)OC₂-C₁₈ alkenyl, (C₀-C₈ alkyl)OC(O)OC₂-C₁₈ alkynyl, (C₀-C₈ alkyl)OC(O)OH, (C₀-C₈ alkyl)OC(O)NR²⁴C₁-C₁₈ alkyl, (C₀-C₈ alkyl)OC(O)NR²⁴C₂-C₁₈ alkenyl, (C₀-C₈ alkyl)OC(O)NR²⁴C₂-C₁₈ alkynyl, (C₀-C₈ alkyl)OC(O)NR²⁴H₂, (C₀-C₈ alkyl)NR²⁴(O)OC₁-C₁₈ alkyl, (C₀-C₈ alkyl)NR²⁴(O)OC₂-C₁₈ alkenyl, (C₀-C₈ alkyl)NR²⁴(O)OC₂-C₁₈ alkynyl, or (C₀-C₈ alkyl)NR²⁴(O)OH;

[0131] R⁴ is hydrogen, (C₀-C₈ alkyl)halo, C₁-C₁₈ alkyl, C₂-C₁₈ alkenyl, C₂-C₁₈ alkynyl, heteroalkyl, (C₀-C₈ alkyl)aryl, (C₀-C₈ alkyl)heteroaryl, (C₀-C₈ alkyl)OC₁-C₁₈ alkyl, (C₀-C₈ alkyl)OC₂-C₁₈ alkenyl, (C₀-C₈ alkyl)OC₂-C₁₈ alkynyl, (C₀-C₈ alkyl)OH, (C₀-C₈ alkyl)SH, (C₀-C₈ alkyl)NR²⁴C₁-C₁₈ alkyl, (C₀-C₈ alkyl)NR²⁴C₂-C₁₈ alkenyl, (C₀-C₈ alkyl)NR²⁴C₂-C₁₈ alkynyl, (C₀-C₈ alkyl)NR²⁴H₂, (C₀-C₈ alkyl)C(O)C₁-C₁₈ alkyl, (C₀-C₈ alkyl)C(O)C₂-C₁₈ alkenyl, (C₀-C₈ alkyl)C(O)C₂-C₁₈ alkynyl, (C₀-C₈ alkyl)C(O)H, (C₀-C₈ alkyl)C(O)aryl, (C₀-C₈ alkyl)C(O)heteroaryl, (C₀-C₈ alkyl)C(O)OC₁-C₁₈ alkyl, (C₀-C₈ alkyl)C(O)OC₂-C₁₈ alkenyl, (C₀-C₈ alkyl)C(O)OC₂-C₁₈ alkynyl, (C₀-C₈ alkyl)C(O)OH, (C₀-C₈ alkyl)C(O)O aryl, (C₀-C₈ alkyl)C(O)O heteroaryl, (C₀-C₈ alkyl)OC(O)C₁-C₁₈ alkyl, (C₀-C₈ alkyl)OC(O)C₂-C₁₈ alkenyl, (C₀-C₈ alkyl)OC(O)C₂-C₁₈ alkynyl, (C₀-C₈ alkyl)C(O)NR²⁴C₁-C₁₈ alkyl, (C₀-C₈ alkyl)C(O)NR²⁴C₂-C₁₈ alkenyl, (C₀-C₈ alkyl)C(O)NR²⁴C₂-C₁₈ alkynyl, (C₀-C₈ alkyl)C(O)NR²⁴H₂, (C₀-C₈ alkyl)C(O)NR²⁴aryl, (C₀-C₈ alkyl)C(O)NR²⁴heteroaryl, (C₀-C₈ alkyl)NR²⁴C(O)C₁-C₁₈ alkyl, (C₀-C₈ alkyl)NR²⁴C(O)C₂-C₈ alkenyl, or (C₀-C₈ alkyl)NR²⁴C(O)C₂-C₁₈ alkynyl, (C₀-C₈ alkyl)NR²⁴C(O)OH, (C₀-C₈ alkyl)OC(O)OC₁-C₁₈ alkyl, (C₀-C₈ alkyl)OC(O)OC₂-C₁₈ alkenyl, (C₀-C₈ alkyl)OC(O)OC₂-C₁₈ alkynyl, (C₀-C₈ alkyl)OC(O)OH, (C₀-C₈ alkyl)OC(O)NR²⁴C₁-C₁₈ alkyl, (C₀-C₈ alkyl)OC(O)NR²⁴C₂-C₁₈ alkenyl, (C₀-C₈ alkyl)OC(O)NR²⁴C₂-C₁₈ alkynyl, (C₀-C₈ alkyl)OC(O)NR²⁴H₂, (C₀-C₈ alkyl)NR²⁴(O)OC₁-C₁₈ alkyl, (C₀-C₈ alkyl)NR²⁴(O)OC₂-C₁₈ alkenyl, (C₀-C₈ alkyl)NR²⁴(O)OC₂-C₁₈ alkynyl, or (C₀-C₈ alkyl)NR²⁴(O)OH; and

[0132] R²⁴ is hydrogen or C₁-C₁₈ alkyl.

[0133] In some embodiments, Y comprises a structure of Formula A wherein

[0134] R¹ is present and is hydrogen, C₁-C₇ alkyl; (C₀-C₃ alkyl)C(O)C₁-C₇ alkyl, (C₀-C₃ alkyl)C(O)aryl, or SO₃H;

[0135] R² is present and is hydrogen, halo, OH, or C₁-C₇ alkyl;

[0136] R³ is hydrogen, halo, OH, or C₁-C₇ alkyl;

[0137] R⁴ is hydrogen, (C₀-C₈ alkyl)halo, C₁-C₈ alkyl, C₂-C₈ alkenyl, C₂₋₁₈ alkynyl, heteroalkyl, (C₀-C₈ alkyl)aryl, (C₀-C₈ alkyl)heteroaryl, (C₀-C₈ alkyl)OC₁-C₈ alkyl, (C₀-C₈ alkyl)OC₂-C₈ alkenyl, (C₀-C₈ alkyl)OC₂-C₈ alkynyl, (C₀-C₈ alkyl)OH, (C₀-C₈ alkyl)SH, (C₀-C₈ alkyl)NR²⁴C₁-C₈ alkyl, (C₀-C₈ alkyl)NR²⁴C₂-C₈ alkenyl, (C₀-C₈ alkyl)NR²⁴C₂-C₈ alkynyl, (C₀-C₈ alkyl)NR²⁴H₂, (C₀-C₈ alkyl)C(O)C₁-C₈ alkyl, (C₀-C₈ alkyl)C(O)C₂-C₈ alkenyl, (C₀-C₈ alkyl)C(O)C₂-C₈ alkynyl, (C₀-C₈ alkyl)C(O)H, (C₀-C₈ alkyl)C(O)aryl, (C₀-C₈ alkyl)C(O)heteroaryl, (C₀-C₈ alkyl)C(O)OC₁-C₈ alkyl, (C₀-C₈ alkyl)C(O)OC₂-C₈ alkenyl, (C₀-C₈ alkyl)C(O)OC₂-C₈ alkynyl, (C₀-C₈ alkyl)C(O)OH, (C₀-C₈ alkyl)C(O)O aryl, (C₀-C₈ alkyl)C(O)O heteroaryl, (C₀-C₈ alkyl)OC(O)C₁-C₈ alkyl, (C₀-C₈ alkyl)OC(O)C₂-C₈ alkenyl, (C₀-C₈ alkyl)OC(O)C₂-C₁₈ alkynyl, (C₀-C₈ alkyl)C(O)NR²⁴C₁-C₈ alkyl, (C₀-C₈ alkyl)C(O)NR²⁴C₂-C₈ alkenyl, (C₀-C₈ alkyl)C(O)NR²⁴C₂-C₈ alkynyl, (C₀-C₈ alkyl)C(O)NR²⁴H₂, (C₀-C₈ alkyl)C(O)NR²⁴aryl, (C₀-C₈ alkyl)C(O)NR²⁴heteroaryl, (C₀-C₈ alkyl)NR²⁴C(O)C₁-C₈ alkyl, (C₀-C₈ alkyl)NR²⁴C(O)C₂-C₈ alkenyl, or (C₀-C₈ alkyl)NR²⁴C(O)C₂-C₈ alkynyl, (C₀-C₈ alkyl)NR²⁴C(O)OH, (C₀-C₈ alkyl)OC(O)OC₁-C₈ alkyl, (C₀-C₈ alkyl)OC(O)OC₂-C₈ alkenyl, (C₀-C₈ alkyl)OC(O)OC₂-C₈ alkynyl, (C₀-C₈ alkyl)OC(O)OH, (C₀-C₈ alkyl)OC(O)NR²⁴C₁-C₈ alkyl, (C₀-C₈ alkyl)OC(O)NR²⁴C₂-C₈ alkenyl, (C₀-C₈ alkyl)OC(O)NR²⁴C₂-C₈ alkynyl, (C₀-C₈ alkyl)OC(O)NR²⁴H₂, (C₀-C₈ alkyl)NR²⁴(O)OC₁₈ alkyl, (C₀-C₈ alkyl)NR²⁴(O)OC₂-C₈ alkenyl, (C₀-C₈ alkyl)NR²⁴(O)OC₂-C₈ alkynyl, or (C₀-C₈ alkyl)NR²⁴(O)OH; and,

[0138] R²⁴ is hydrogen or C₁-C₇ alkyl.

[0139] In some embodiments, R¹ is hydrogen, propionate, acetate, benzoate, or sulfate; R² is hydrogen or methyl; R³ is hydrogen or methyl; and R⁴ is acetate, cypionate, hemisucciniate, enanthate, or propionate.

[0140] In embodiments wherein Y comprises a structure of Formula A, Y is conjugated to L (e.g. when L is a linking group) or Q (e.g. when L is a bond) at any position of Formula A that is capable of reacting with Q or L. One skilled in the art could readily determine the position of conjugation on Formula A and means of conjugation of Formula A to Q or L in view of general knowledge and the disclosure provided herein. In some embodiments, Formula A is conjugated to L or Q at any of positions 1, 2, 3, 4, 5, 6, 7, 8, 9, 10, 11, 12, 13, 14, 15, 16, 17, 18, 19, or 20 of Formula A. In some embodiments, Formula A is conjugated to L or Q at position 1, 3, 6, 7, 12, 10, 13, 16, 17, or 19 of Formula A.

[0141] In some embodiments, Y acts at an estrogen receptor (e.g. ERα, ERβ. In some embodiments, Y permits or promotes agonist activity at the estrogen receptor, while in other embodiments Y is an antagonist of ER. In exemplary embodiments, Y can have a structure of Formula B:

[chemical structure]

wherein R¹, R⁵ and R⁶ are moieties that permit or promote agonist or antagonist activity upon binding of the compound of Formula B to the estrogen receptor. In some embodiments, Formula B further comprises one or more substitutents at one or more of positions 1, 2, 4, 6, 7, 8, 9, 11, 12, 14, 15, and 16 (e.g. a ketone at position-6).

[0142] In some embodiments when Y comprises a structure of Formula B, wherein

[0143] R¹ is hydrogen, C₁-C₁₈ alkyl, C₂-C₁₈ alkenyl, C₂-C₁₈ alkynyl, heteroalkyl, (C₀-C₈ alkyl)aryl, (C₀-C₈ alkyl)heteroaryl, (C₀-C₈ alkyl)C(O)C₁-C₁₈ alkyl, (C₀-C₈ alkyl)C(O)C₂-C₁₈ alkenyl, (C₀-C₈ alkyl)C(O)C₂-C₁₈ alkynyl, (C₀-C₈ alkyl)C(O)H, (C₀-C₈ alkyl)C(O)aryl, (C₀-C₈ alkyl)C(O)heteroaryl, (C₀-C₈ alkyl)C(O)OC₁-C₁₈ alkyl, (C₀-C₈ alkyl)C(O)OC₂-C₁₈ alkenyl, (C₀-C₈ alkyl)C(O)OC₂-C₁₈ alkynyl, (C₀-C₈ alkyl)C(O)OH, C₀-C₈ alkyl)C(O)O aryl, (C₀-C₈ alkyl)C(O)O heteroaryl, (C₀-C₈ alkyl)C(O)NR²⁴C₁-C₁₈ alkyl, (C₀-C₈ alkyl)C(O)NR²⁴C₂-C₁₈ alkenyl, (C₀-C₈ alkyl)C(O)NR²⁴C₂-C₁₈ alkynyl, (C₀-C₈ alkyl)C(O)NR²⁴H₂, (C₀-C₈ alkyl)C(O)NR²⁴aryl, (C₀-C₈ alkyl)C(O)NR²⁴heteroaryl, or SO₃H;

[0144] R⁵ is hydrogen, (C₀-C₈ alkyl)halo, C₁-C₁₈ alkyl, C₂-C₁₈ alkenyl, C₂-C₁₈ alkynyl, heteroalkyl, (C₀-C₈ alkyl)aryl, (C₀-C₈ alkyl)heteroaryl, (C₀-C₈ alkyl)OC₁-C₁₈ alkyl, (C₀-C₈ alkyl)OC₂-C₁₈ alkenyl, (C₀-C₈ alkyl)OC₂-C₁₈ alkynyl, (C₀-C₈ alkyl)OH, (C₀-C₈ alkyl)SH, (C₀-C₈ alkyl)NR²⁴C₁-C₁₈ alkyl, (C₀-C₈ alkyl)NR²⁴C₂-C₁₈ alkenyl, (C₀-C₈ alkyl)NR²⁴C₂-C₁₈ alkynyl, (C₀-C₈ alkyl)NR²⁴H₂, (C₀-C₈ alkyl)C(O)C₁-C₁₈ alkyl, (C₀-C₈ alkyl)C(O)C₂-C₁₈ alkenyl, (C₀-C₈ alkyl)C(O)C₂-C₁₈ alkynyl, (C₀-C₈ alkyl)C(O)H, (C₀-C₈ alkyl)C(O)aryl, (C₀-C₈ alkyl)C(O)heteroaryl, (C₀-C₈ alkyl)C(O)OC₁-C₁₈ alkyl, (C₀-C₈ alkyl)C(O)OC₂-C₁₈ alkenyl, (C₀-C₈ alkyl)C(O)OC₂-C₁₈ alkynyl, (C₀-C₈ alkyl)C(O)OH, (C₀-C₈ alkyl)C(O)O aryl, (C₀-C₈ alkyl)C(O)O heteroaryl, (C₀-C₈ alkyl)OC(O)C₁-C₁₈ alkyl, (C₀-C₈ alkyl)OC(O)C₂-C₁₈ alkenyl, (C₀-C₈ alkyl)OC(O)C₂-C₁₈ alkynyl, (C₀-C₈ alkyl)C(O)NR²⁴C₁-C₁₈ alkyl, (C₀-C₈ alkyl)C(O)NR²⁴C₂-C₁₈ alkenyl, (C₀-C₈ alkyl)C(O)NR²⁴C₂-C₁₈ alkynyl, (C₀-C₈ alkyl)C(O)NR²⁴H₂, (C₀-C₈ alkyl)C(O)NR²⁴aryl, (C₀-C₈ alkyl)C(O)NR²⁴heteroaryl, (C₀-C₈ alkyl)NR²⁴C(O)C₁-C₁₈ alkyl, (C₀-C₈ alkyl)NR²⁴C(O)C₂-C₈ alkenyl, or (C₀-C₈ alkyl)NR²⁴C(O)C₂-C₁₈ alkynyl, (C₀-C₈ alkyl)NR²⁴C(O)OH, (C₀-C₈ alkyl)OC(O)OC₁-C₁₈ alkyl, (C₀-C₈ alkyl)OC(O)OC₂-C₁₈ alkenyl, (C₀-C₈ alkyl)OC(O)OC₂-C₁₈ alkynyl, (C₀-C₈ alkyl)OC(O)OH, (C₀-C₈ alkyl)OC(O)NR²⁴C₁-C₁₈ alkyl, (C₀-C₈ alkyl)OC(O)NR²⁴C₂-C₁₈ alkenyl, (C₀-C₈ alkyl)OC(O)NR²⁴C₂-C₁₈ alkynyl, (C₀-C₈ alkyl)OC(O)NR²⁴H₂, (C₀-C₈ alkyl)NR²⁴(O)OC₁-C₁₈ alkyl, (C₀-C₈ alkyl)NR²⁴(O)OC₂-C₁₈ alkenyl, (C₀-C₈ alkyl)NR²⁴(O)OC₂-C₁₈ alkynyl, or (C₀-C₈ alkyl)NR²⁴(O)OH; (C₀-C₈ alkyl)C(O)C₁-C₁₈ alkyl, (C₀-C₈ alkyl)C(O)C₂-C₁₈ alkenyl, (C₀-C₈ alkyl)C(O)C₂-C₁₈ alkynyl, (C₀-C₈ alkyl)C(O)OC₁-C₁₈ alkyl, (C₀-C₈ alkyl)C(O)OC₂-C₁₈ alkenyl, (C₀-C₈ alkyl)C(O)OC₂-C₁₈ alkynyl, (C₀-C₈ alkyl)C(O)OH, (C₀-C₈ alkyl)OC(O)C₁-C₁₈ alkyl, (C₀-C₈ alkyl)OC(O)C₂-C₁₈ alkenyl, (C₀-C₈ alkyl)OC(O)C₂-C₁₈ alkynyl, (C₀-C₈ alkyl)C(O)NR²⁴C₁-C₁₈ alkyl, (C₀-C₈ alkyl)C(O)NR²⁴C₂-C₁₈ alkenyl, (C₀-C₈ alkyl)C(O)NR²⁴C₂-C₁₈ alkynyl, (C₀-C₈ alkyl)C(O)NR²⁴H₂, (C₀-C₈ alkyl)NR²⁴C(O)C₁-C₁₈ alkyl, (C₀-C₈ alkyl)NR²⁴C(O)C₂-C₈ alkenyl, or (C₀-C₈ alkyl)NR²⁴C(O)C₂-C₁₈ alkynyl, or (C₀-C₈ alkyl)NR²⁴C(O)OH;

[0145] R⁶ is hydrogen, C₁-C₁₈ alkyl, C₂-C₁₈ alkenyl, C₂-C₁₈ alkynyl, heteroalkyl, (C₀-C₈ alkyl)aryl, (C₀-C₈ alkyl)heteroaryl, (C₀-C₈ alkyl)C(O)C₁-C₁₈ alkyl, (C₀-C₈ alkyl)C(O)C₂-C₁₈ alkenyl, (C₀-C₈ alkyl)C(O)C₂-C₁₈ alkynyl, (C₀-C₈ alkyl)C(O)H, (C₀-C₈ alkyl)C(O)aryl, (C₀-C₈ alkyl)C(O)heteroaryl, (C₀-C₈ alkyl)C(O)OC₁-C₁₈ alkyl, (C₀-C₈ alkyl)C(O)OC₂-C₁₈ alkenyl, (C₀-C₈ alkyl)C(O)OC₂-C₁₈ alkynyl, (C₀-C₈ alkyl)C(O)OH, C₀-C₈ alkyl)C(O)O aryl, (C₀-C₈ alkyl)C(O)O heteroaryl, (C₀-C₈ alkyl)C(O)NR²⁴C₁-C₁₈ alkyl, (C₀-C₈ alkyl)C(O)NR²⁴C₂-C₁₈ alkenyl, (C₀-C₈ alkyl)C(O)NR²⁴C₂-C₁₈ alkynyl, (C₀-C₈ alkyl)C(O)NR²⁴H₂, (C₀-C₈ alkyl)C(O)NR²⁴aryl, (C₀-C₈ alkyl)C(O)NR²⁴heteroaryl, or SO₃H; and,

[0146] R²⁴ is hydrogen or C₁-C₁₈ alkyl.

[0147] In some embodiments, Y comprises a structure of Formula B, wherein

[0148] R¹ is hydrogen, C₁-C₇ alkyl; (C₀-C₃ alkyl)C(O)C₁-C₇ alkyl, (C₀-C₃ alkyl)C(O)aryl, or SO₃H;

[0149] R⁵ is hydrogen, (C₀-C₈ alkyl)halo, C₁-C₈ alkyl, C₂-C₈ alkenyl, C₂₋₁₈ alkynyl, heteroalkyl, (C₀-C₈ alkyl)aryl, (C₀-C₈ alkyl)heteroaryl, (C₀-C₈ alkyl)OC₁-C₈ alkyl, (C₀-C₈ alkyl)OC₂-C₈ alkenyl, (C₀-C₈ alkyl)OC₂-C₈ alkynyl, (C₀-C₈ alkyl)OH, (C₀-C₈ alkyl)SH, (C₀-C₈ alkyl)NR²⁴C₁-C₈ alkyl, (C₀-C₈ alkyl)NR²⁴C₂-C₈ alkenyl, (C₀-C₈ alkyl)NR²⁴C₂-C₈ alkynyl, (C₀-C₈ alkyl)NR²⁴H₂, (C₀-C₈ alkyl)C(O)C₁-C₈ alkyl, (C₀-C₈ alkyl)C(O)C₂-C₈ alkenyl, (C₀-C₈ alkyl)C(O)C₂-C₈ alkynyl, (C₀-C₈ alkyl)C(O)H, (C₀-C₈ alkyl)C(O)aryl, (C₀-C₈ alkyl)C(O)heteroaryl, (C₀-C₈ alkyl)C(O)OC₁-C₈ alkyl, (C₀-C₈ alkyl)C(O)OC₂-C₈ alkenyl, (C₀-C₈ alkyl)C(O)OC₂-C₈ alkynyl, (C₀-C₈ alkyl)C(O)OH, (C₀-C₈ alkyl)C(O)O aryl, (C₀-C₈ alkyl)C(O)O heteroaryl, (C₀-C₈ alkyl)OC(O)C₁-C₈ alkyl, (C₀-C₈ alkyl)OC(O)C₂-C₈ alkenyl, (C₀-C₈ alkyl)OC(O)C₂-C₁₈ alkynyl, (C₀-C₈ alkyl)C(O)NR²⁴C₁-C₈ alkyl, (C₀-C₈ alkyl)C(O)NR²⁴C₂-C₈ alkenyl, (C₀-C₈ alkyl)C(O)NR²⁴C₂-C₈ alkynyl, (C₀-C₈ alkyl)C(O)NR²⁴H₂, (C₀-C₈ alkyl)C(O)NR²⁴aryl, (C₀-C₈ alkyl)C(O)NR²⁴heteroaryl, (C₀-C₈ alkyl)NR²⁴C(O)C₁-C₈ alkyl, (C₀-C₈ alkyl)NR²⁴C(O)C₂-C₈ alkenyl, or (C₀-C₈ alkyl)NR²⁴C(O)C₂-C₈ alkynyl, (C₀-C₈ alkyl)NR²⁴C(O)OH, (C₀-C₈ alkyl)OC(O)OC₁-C₈ alkyl, (C₀-C₈ alkyl)OC(O)OC₂-C₈ alkenyl, (C₀-C₈ alkyl)OC(O)OC₂-C₈ alkynyl, (C₀-C₈ alkyl)OC(O)OH, (C₀-C₈ alkyl)OC(O)NR²⁴C₁-C₈ alkyl, (C₀-C₈ alkyl)OC(O)NR²⁴C₂-C₈ alkenyl, (C₀-C₈ alkyl)OC(O)NR²⁴C₂-C₈ alkynyl, (C₀-C₈ alkyl)OC(O)NR²⁴H₂, (C₀-C₈ alkyl)NR²⁴(O)OC₁-C₈ alkyl, (C₀-C₈ alkyl)NR²⁴(O)OC₂-C₈ alkenyl, (C₀-C₈ alkyl)NR²⁴(O)OC₂-C₈ alkynyl, or (C₀-C₈ alkyl)NR²⁴(O)OH;

[0150] R⁶ is hydrogen, C₁-C₈ alkyl, C₂-C₈ alkenyl, C₂-C₈ alkynyl, heteroalkyl, (C₀-C₈ alkyl)aryl, (C₀-C₈ alkyl)heteroaryl, (C₀-C₈ alkyl)C(O)C₁-C₈ alkyl, (C₀-C₈ alkyl)C(O)C₂-C₈ alkenyl, (C₀-C₈ alkyl)C(O)C₂-C₈ alkynyl, (C₀-C₈ alkyl)C(O)H, (C₀-C₈ alkyl)C(O)aryl, (C₀-C₈ alkyl)C(O)heteroaryl, (C₀-C₈ alkyl)C(O)OC₁-C₈ alkyl, (C₀-C₈ alkyl)C(O)OC₂-C₈ alkenyl, (C₀-C₈ alkyl)C(O)OC₂-C₈ alkynyl, (C₀-C₈ alkyl)C(O)OH, C₀-C₈ alkyl)C(O)O aryl, (C₀-C₈ alkyl)C(O)O heteroaryl, (C₀-C₈ alkyl)C(O)NR²⁴C₁-C₈ alkyl, (C₀-C₈ alkyl)C(O)NR²⁴C₂-C₈ alkenyl, (C₀-C₈ alkyl)C(O)NR²⁴C₂-C₈ alkynyl, (C₀-C₈ alkyl)C(O)NR²⁴H₂, (C₀-C₈ alkyl)C(O)NR²⁴aryl, or (C₀-C₈ alkyl)C(O)NR²⁴heteroaryl; and

[0151] R²⁴ is hydrogen or C₁-C₇ alkyl.

[0152] For example, R¹ is hydrogen, propionate, acetate, benzoate, or sulfate; R⁵ is hydrogen, ethynyl, hydroxyl; and R⁶ is acetate, cypionate, hemisucciniate, enanthate, or propionate.

[0153] Nonlimiting examples of the compound of Formula B include 17β-estradiol, modified forms of estradiol such as β-estradiol 17-acetate, β-estradiol 17-cypionate, β-estradiol 17-enanthate, β-estradiol 17-valerate, β-estradiol 3,17-diacetate, β-estradiol 3,17-dipropionate, β-estradiol 3-benzoate, β-estradiol 3-benzoate 17-n-butyrate, β-estradiol 3-glycidyl ether, β-estradiol 3-methyl ether, β-estradiol 6-one, β-estradiol 3-glycidyl, β-estradiol 6-one 6-(O-carboxymethyloxime), 16-epiestriol, 17-epiestriol, 2-methoxy estradiol, 4-methoxy estradiol, estradiol 17-phenylpropionate, and 17β-estradiol 2-methyl ether, 17α-ethynylestradiol, megestrol acetate, estriol, and derivatives thereof. In some embodiments, carbon 17 has a ketone substitutent and R⁵ and R⁶ are absent (e.g. estrone). Some of the aforementioned compounds of Formula B are shown below:

[chemical structure]

[0154] In embodiments wherein Y comprises a structure of Formula B, Y is conjugated to L (e.g. when L is a linking group) or Q (e.g. when L is a bond) at any position of Formula B that is capable of reacting with Q or L. One skilled in the art could readily determine the position of conjugation on Formula B and means of conjugation of Formula B to Q or L in view of general knowledge and the disclosure provided herein. In some embodiments, Formula B is conjugated to L or Q at any of positions 1, 2, 3, 4, 5, 6, 7, 8, 9, 10, 11, 12, 13, 14, 15, 16, 17, 18, 19, or 20 of Formula B. In some embodiments, Formula B is conjugated to L or Q at position 3 or 17 of Formula B.

[0155] In other embodiments, Y acts at an estrogen receptor but is not encompassed by Formula B. Nonlimiting examples of ligands that act at an estrogen receptor that are not encompassed by Formula B are shown below:

[chemical structure]

[0156] In some embodiments, Y acts at a glucocorticoid receptor (GR). In some embodiments, Y comprises any structure that permits or promotes agonist activity at the GR, while in other embodiments Y is an antagonist of GR. In exemplary embodiments, Y comprises a structure of Formula C:

[chemical structure]

wherein R², R³, R⁶, R⁷, R⁸, R⁹, and R¹⁰ are each independently moieties that permit or promote agonist or antagonist activity upon the binding of the compound of Formula C to the GR; and each dash represents an optional double bond. In some embodiments, Formula C further comprises one or more substituents at one or more of positions 1, 2, 4, 5, 6, 7, 8, 9, 11, 12, 14, and 15 (e.g. hydroxyl or ketone at position-11).

[0157] In some embodiments, Y comprises a structure of Formula C wherein

[0158] R² is hydrogen, (C₀-C₁₈ alkyl)halo, C₁-C₁₈ alkyl, C₂-C₁₈ alkenyl, C₂-C₁₈ alkynyl, heteroalkyl, (C₀-C₈ alkyl)aryl, (C₀-C₈ alkyl)heteroaryl, (C₀-C₈ alkyl)OC₁-C₁₈ alkyl, (C₀-C₈ alkyl)OC₂-C₁₈ alkenyl, (C₀-C₈ alkyl)OC₂-C₁₈ alkynyl, (C₀-C₈ alkyl)OH, (C₀-C₈ alkyl)SH, (C₀-C₈ alkyl)NR²⁴C₁-C₁₈ alkyl, (C₀-C₈ alkyl)NR²⁴C₂-C₁₈ alkenyl, (C₀-C₈ alkyl)NR²⁴C₂-C₁₈ alkynyl, (C₀-C₈ alkyl)NR²⁴H₂, (C₀-C₈ alkyl)C(O)C₁-C₁₈ alkyl, (C₀-C₈ alkyl)C(O)C₂-C₁₈ alkenyl, (C₀-C₈ alkyl)C(O)C₂-C₁₈ alkynyl, (C₀-C₈ alkyl)C(O)H, (C₀-C₈ alkyl)C(O)aryl, (C₀-C₈ alkyl)C(O)heteroaryl, (C₀-C₈ alkyl)C(O)OC₁-C₁₈ alkyl, (C₀-C₈ alkyl)C(O)OC₂-C₁₈ alkenyl, (C₀-C₈ alkyl)C(O)OC₂-C₁₈ alkynyl, (C₀-C₈ alkyl)C(O)OH, (C₀-C₈ alkyl)C(O)O aryl, (C₀-C₈ alkyl)C(O)O heteroaryl, (C₀-C₈ alkyl)OC(O)C₁-C₁₈ alkyl, (C₀-C₈ alkyl)OC(O)C₂-C₁₈ alkenyl, (C₀-C₈ alkyl)OC(O)C₂-C₁₈ alkynyl, (C₀-C₈ alkyl)C(O)NR²⁴C₁-C₁₈ alkyl, (C₀-C₈ alkyl)C(O)NR²⁴C₂-C₁₈ alkenyl, (C₀-C₈ alkyl)C(O)NR²⁴C₂-C₁₈ alkynyl, (C₀-C₈ alkyl)C(O)NR²⁴H₂, (C₀-C₈ alkyl)C(O)NR²⁴aryl, (C₀-C₈ alkyl)C(O)NR²⁴heteroaryl, (C₀-C₈ alkyl)NR²⁴C(O)C₁-C₁₈ alkyl, (C₀-C₈ alkyl)NR²⁴C(O)C₂-C₈ alkenyl, or (C₀-C₈ alkyl)NR²⁴C(O)C₂-C₁₈ alkynyl, (C₀-C₈ alkyl)NR²⁴C(O)OH, (C₀-C₈ alkyl)OC(O)OC₁-C₁₈ alkyl, (C₀-C₈ alkyl)OC(O)OC₂-C₁₈ alkenyl, (C₀-C₈ alkyl)OC(O)OC₂-C₁₈ alkynyl, (C₀-C₈ alkyl)OC(O)OH, (C₀-C₈ alkyl)OC(O)NR²⁴C₁-C₁₈ alkyl, (C₀-C₈ alkyl)OC(O)NR²⁴C₂-C₁₈ alkenyl, (C₀-C₈ alkyl)OC(O)NR²⁴C₂-C₁₈ alkynyl, (C₀-C₈ alkyl)OC(O)NR²⁴H₂, (C₀-C₈ alkyl)NR²⁴(O)OC₁-C₁₈ alkyl, (C₀-C₈ alkyl)NR²⁴(O)OC₂-C₁₈ alkenyl, (C₀-C₈ alkyl)NR²⁴(O)OC₂-C₁₈ alkynyl, or (C₀-C₈ alkyl)NR²⁴(O)OH;

[0159] R³ is hydrogen, (C₀-C₈ alkyl)halo, C₁-C₁₈ alkyl, C₂-C₁₈ alkenyl, C₂-C₁₈ alkynyl, heteroalkyl, (C₀-C₈ alkyl)aryl, (C₀-C₈ alkyl)heteroaryl, (C₀-C₈ alkyl)OC₁-C₁₈ alkyl, (C₀-C₈ alkyl)OC₂-C₁₈ alkenyl, (C₀-C₈ alkyl)OC₂-C₁₈ alkynyl, (C₀-C₈ alkyl)OH, (C₀-C₈ alkyl)SH, (C₀-C₈ alkyl)NR²⁴C₁-C₁₈ alkyl, (C₀-C₈ alkyl)NR²⁴C₂-C₁₈ alkenyl, (C₀-C₈ alkyl)NR²⁴C₂-C₁₈ alkynyl, (C₀-C₈ alkyl)NR²⁴H₂, (C₀-C₈ alkyl)C(O)C₁-C₁₈ alkyl, (C₀-C₈ alkyl)C(O)C₂-C₁₈ alkenyl, (C₀-C₈ alkyl)C(O)C₂-C₁₈ alkynyl, (C₀-C₈ alkyl)C(O)H, (C₀-C₈ alkyl)C(O)aryl, (C₀-C₈ alkyl)C(O)heteroaryl, (C₀-C₈ alkyl)C(O)OC₁-C₁₈ alkyl, (C₀-C₈ alkyl)C(O)OC₂-C₁₈ alkenyl, (C₀-C₈ alkyl)C(O)OC₂-C₁₈ alkynyl, (C₀-C₈ alkyl)C(O)OH, (C₀-C₈ alkyl)C(O)O aryl, (C₀-C₈ alkyl)C(O)O heteroaryl, (C₀-C₈ alkyl)OC(O)C₁-C₁₈ alkyl, (C₀-C₈ alkyl)OC(O)C₂-C₁₈ alkenyl, (C₀-C₈ alkyl)OC(O)C₂-C₁₈ alkynyl, (C₀-C₈ alkyl)C(O)NR²⁴C₁-C₁₈ alkyl, (C₀-C₈ alkyl)C(O)NR²⁴C₂-C₁₈ alkenyl, (C₀-C₈ alkyl)C(O)NR²⁴C₂-C₁₈ alkynyl, (C₀-C₈ alkyl)C(O)NR²⁴H₂, (C₀-C₈ alkyl)C(O)NR²⁴aryl, (C₀-C₈ alkyl)C(O)NR²⁴heteroaryl, (C₀-C₈ alkyl)NR²⁴C(O)C₁-C₁₈ alkyl, (C₀-C₈ alkyl)NR²⁴C(O)C₂-C₈ alkenyl, or (C₀-C₈ alkyl)NR²⁴C(O)C₂-C₁₈ alkynyl, (C₀-C₈ alkyl)NR²⁴C(O)OH, (C₀-C₈ alkyl)OC(O)OC₁-C₁₈ alkyl, (C₀-C₈ alkyl)OC(O)OC₂-C₁₈ alkenyl, (C₀-C₈ alkyl)OC(O)OC₂-C₁₈ alkynyl, (C₀-C₈ alkyl)OC(O)OH, (C₀-C₈ alkyl)OC(O)NR²⁴C₁-C₁₈ alkyl, (C₀-C₈ alkyl)OC(O)NR²⁴C₂-C₁₈ alkenyl, (C₀-C₈ alkyl)OC(O)NR²⁴C₂-C₁₈ alkynyl, (C₀-C₈ alkyl)OC(O)NR²⁴H₂, (C₀-C₈ alkyl)NR²⁴(O)OC₁-C₁₈ alkyl, (C₀-C₈ alkyl)NR²⁴(O)OC₂-C₁₈ alkenyl, (C₀-C₈ alkyl)NR²⁴(O)OC₂-C₁₈ alkynyl, or (C₀-C₈ alkyl)NR²⁴(O)OH;

[0160] R⁶ is hydrogen, C₁-C₁₈ alkyl, C₂-C₁₈ alkenyl, C₂-C₁₈ alkynyl, heteroalkyl, (C₀-C₈ alkyl)aryl, (C₀-C₈ alkyl)heteroaryl, (C₀-C₈ alkyl)C(O)C₁-C₁₈ alkyl, (C₀-C₈ alkyl)C(O)C₂-C₁₈ alkenyl, (C₀-C₈ alkyl)C(O)C₂-C₁₈ alkynyl, (C₀-C₈ alkyl)C(O)H, (C₀-C₈ alkyl)C(O)aryl, (C₀-C₈ alkyl)C(O)heteroaryl, (C₀-C₈ alkyl)C(O)OC₁-C₁₈ alkyl, (C₀-C₈ alkyl)C(O)OC₂-C₁₈ alkenyl, (C₀-C₈ alkyl)C(O)OC₂-C₁₈ alkynyl, (C₀-C₈ alkyl)C(O)OH, C₀-C₈ alkyl)C(O)O aryl, (C₀-C₈ alkyl)C(O)O heteroaryl, (C₀-C₈ alkyl)C(O)NR²⁴C₁-C₁₈ alkyl, (C₀-C₈ alkyl)C(O)NR²⁴C₂-C₁₈ alkenyl, (C₀-C₈ alkyl)C(O)NR²⁴C₂-C₁₈ alkynyl, (C₀-C₈ alkyl)C(O)NR²⁴H₂, (C₀-C₈ alkyl)C(O)NR²⁴aryl, or (C₀-C₈ alkyl)C(O)NR²⁴heteroaryl;

[0161] R⁷ is hydrogen, C₁-C₁₈ alkyl, C₂-C₁₈ alkenyl, C₂-C₁₈ alkynyl, heteroalkyl, (C₀-C₈ alkyl)aryl, (C₀-C₈ alkyl)heteroaryl, (C₀-C₈ alkyl)C(O)C₁-C₁₈ alkyl, (C₀-C₈ alkyl)C(O)C₂-C₁₈ alkenyl, (C₀-C₈ alkyl)C(O)C₂-C₁₈ alkynyl, (C₀-C₈ alkyl)C(O)H, (C₀-C₈ alkyl)C(O)aryl, (C₀-C₈ alkyl)C(O)heteroaryl, (C₀-C₈ alkyl)C(O)OC₁-C₁₈ alkyl, (C₀-C₈ alkyl)C(O)OC₂-C₁₈ alkenyl, (C₀-C₈ alkyl)C(O)OC₂-C₁₈ alkynyl, (C₀-C₈ alkyl)C(O)OH, C₀-C₈ alkyl)C(O)O aryl, (C₀-C₈ alkyl)C(O)O heteroaryl, (C₀-C₈ alkyl)C(O)NR²⁴C₁-C₁₈ alkyl, (C₀-C₈ alkyl)C(O)NR²⁴C₂-C₁₈ alkenyl, (C₀-C₈ alkyl)C(O)NR²⁴C₂-C₁₈ alkynyl, (C₀-C₈ alkyl)C(O)NR²⁴H₂, (C₀-C₈ alkyl)C(O)NR²⁴aryl, or (C₀-C₈ alkyl)C(O)NR²⁴heteroaryl;

[0162] R⁸ is hydrogen, (C₀-C₈ alkyl)halo, C₁-C₁₈ alkyl, C₂-C₁₈ alkenyl, C₂-C₁₈ alkynyl, heteroalkyl, (C₀-C₈ alkyl)aryl, (C₀-C₈ alkyl)heteroaryl;

[0163] R⁹ is hydrogen, (C₀-C₈ alkyl)halo, C₁-C₁₈ alkyl, C₂-C₁₈ alkenyl, C₂-C₁₈ alkynyl, heteroalkyl, (C₀-C₈ alkyl)aryl, (C₀-C₈ alkyl)heteroaryl;

[0164] R¹⁰ is hydrogen, (C₀-C₈ alkyl)halo, C₁-C₁₈ alkyl, or (C₀-C₈ alkyl)OH; and

[0165] R²⁴ is hydrogen or C₁-C₁₈ alkyl.

[0166] In some embodiments, Y comprises a structure of Formula C, wherein

[0167] R² is hydrogen, halo, OH, or C₁-C₇ alkyl;

[0168] R³ is hydrogen, halo, OH, or C₁-C₇ alkyl;

[0169] R⁶ is hydrogen, C₁-C₈ alkyl, C₂-C₈ alkenyl, C₂-C₈ alkynyl, heteroalkyl, (C₀-C₈ alkyl)aryl, (C₀-C₈ alkyl)heteroaryl, (C₀-C₈ alkyl)C(O)C₁-C₈ alkyl, (C₀-C₈ alkyl)C(O)C₂-C₈ alkenyl, (C₀-C₈ alkyl)C(O)C₂-C₈ alkynyl, (C₀-C₈ alkyl)C(O)H, (C₀-C₈ alkyl)C(O)aryl, (C₀-C₈ alkyl)C(O)heteroaryl, (C₀-C₈ alkyl)C(O)OC₁-C₈ alkyl, (C₀-C₈ alkyl)C(O)OC₂-C₈ alkenyl, (C₀-C₈ alkyl)C(O)OC₂-C₈ alkynyl, (C₀-C₈ alkyl)C(O)OH, C₀-C₈ alkyl)C(O)O aryl, (C₀-C₈ alkyl)C(O)O heteroaryl, (C₀-C₈ alkyl)C(O)NR²⁴C₁-C₈ alkyl, (C₀-C₈ alkyl)C(O)NR²⁴C₂-C₈ alkenyl, (C₀-C₈ alkyl)C(O)NR²⁴C₂-C₈ alkynyl, (C₀-C₈ alkyl)C(O)NR²⁴H₂, (C₀-C₈ alkyl)C(O)NR²⁴aryl, or (C₀-C₈ alkyl)C(O)NR²⁴heteroaryl;

[0170] R⁷ is hydrogen, C₁-C₈ alkyl, C₂-C₈ alkenyl, C₂-C₈ alkynyl, heteroalkyl, (C₀-C₈ alkyl)aryl, (C₀-C₈ alkyl)heteroaryl, (C₀ alkyl)C(O)C₁-C₈ alkyl, (C₀ alkyl)C(O)C₂-C₈ alkenyl, (C₀ alkyl)C(O)C₂-C₈ alkynyl, (C₀)C(O)aryl, (C₀)C(O)heteroaryl, (C₀)C(O)OC₁-C₈ alkyl, (C₀ alkyl)C(O)OC₂-C₈ alkenyl, (C₀ alkyl)C(O)OC₂-C₈ alkynyl, or (C₀ alkyl)C(O)OH;

[0171] R⁸ is hydrogen or C₁-C₇ alkyl;

[0172] R⁹ is hydrogen or C₁-C₇ alkyl;

[0173] R¹⁰ is hydrogen or OH; and

[0174] R²⁴ is hydrogen or C₁-C₇ alkyl.

[0175] For example, R² is hydrogen or methyl; R³ is hydrogen, fluoro, chloro, or methyl; R⁶ is hydrogen or C(O)C₁-C₇ alkyl; R⁷ is hydrogen, C(O)CH₃, or C(O)CH₂CH₃; R⁸ is hydrogen or methyl; R⁹ is hydrogen or methyl; and R¹⁰ is hydroxyl.

[0176] Nonlimiting examples of structures of Formula C include:

[chemical structure]

[chemical structure]

[chemical structure]

and derivatives thereof.

[0177] In embodiments wherein Y comprises a structure of Formula C, Y is conjugated to L (e.g. when L is a linking group) or Q (e.g. when L is a bond) at any position of Formula C that is capable of reacting with Q or L. One skilled in the art could readily determine the position of conjugation on Formula C and means of conjugation of Formula C to Q or L in view of general knowledge and the disclosure provided herein. In some embodiments, Formula C is conjugated to L or Q at any of positions 1, 2, 3, 4, 5, 6, 7, 8, 9, 10, 11, 12, 13, 14, 15, 16, 17, 18, 19, 20, 21, 22, or 23 of Formula C. In some embodiments, Formula C is conjugated to L or Q at position 3, 10, 16 or 17 of Formula C.

[0178] In some embodiments, Y acts at a mineralcorticoid receptor (MR). In some embodiments, Y comprises any structure that permits or promotes agonist activity at the MR, while in other embodiments Y is an antagonist of MR. In exemplary embodiments, Y comprises a structure of Formula D:

[chemical structure]

wherein R², R³, R⁷ and R¹⁰ are each independently a moiety that permits or promotes agonist or antagonist activity upon binding of the compound of Formula D to the MR; and the dashed line indicates an optional double bond. In some embodiments, Formula D further comprises one or more substituents at one or more of positions 1, 2, 4, 5, 6, 7, 8, 11, 12, 14, 15, 16, and 17.

[0179] In some embodiments, Y comprises a structure of Formula D wherein

[0180] R² is hydrogen, (C₀-C₈ alkyl)halo, C₁-C₁₈ alkyl, C₂-C₁₈ alkenyl, C₂-C₁₈ alkynyl, heteroalkyl, (C₀-C₈ alkyl)aryl, (C₀-C₈ alkyl)heteroaryl, (C₀-C₈ alkyl)OC₁-C₁₈ alkyl, (C₀-C₈ alkyl)OC₂-C₁₈ alkenyl, (C₀-C₈ alkyl)OC₂-C₁₈ alkynyl, (C₀-C₈ alkyl)OH, (C₀-C₈ alkyl)SH, (C₀-C₈ alkyl)NR²⁴C₁-C₁₈ alkyl, (C₀-C₈ alkyl)NR²⁴C₂-C₁₈ alkenyl, (C₀-C₈ alkyl)NR²⁴C₂-C₁₈ alkynyl, (C₀-C₈ alkyl)NR²⁴H₂, (C₀-C₈ alkyl)C(O)C₁-C₁₈ alkyl, (C₀-C₈ alkyl)C(O)C₂-C₁₈ alkenyl, (C₀-C₈ alkyl)C(O)C₂-C₁₈ alkynyl, (C₀-C₈ alkyl)C(O)H, (C₀-C₈ alkyl)C(O)aryl, (C₀-C₈ alkyl)C(O)heteroaryl, (C₀-C₈ alkyl)C(O)OC₁-C₁₈ alkyl, (C₀-C₈ alkyl)C(O)OC₂-C₁₈ alkenyl, (C₀-C₈ alkyl)C(O)OC₂-C₁₈ alkynyl, (C₀-C₈ alkyl)C(O)OH, (C₀-C₈ alkyl)C(O)O aryl, (C₀-C₈ alkyl)C(O)O heteroaryl, (C₀-C₈ alkyl)OC(O)C₁-C₁₈ alkyl, (C₀-C₈ alkyl)OC(O)C₂-C₁₈ alkenyl, (C₀-C₈ alkyl)OC(O)C₂-C₁₈ alkynyl, (C₀-C₈ alkyl)C(O)NR²⁴C₁-C₁₈ alkyl, (C₀-C₈ alkyl)C(O)NR²⁴C₂-C₁₈ alkenyl, (C₀-C₈ alkyl)C(O)NR²⁴C₂-C₁₈ alkynyl, (C₀-C₈ alkyl)C(O)NR²⁴H₂, (C₀-C₈ alkyl)C(O)NR²⁴aryl, (C₀-C₈ alkyl)C(O)NR²⁴heteroaryl, (C₀-C₈ alkyl)NR²⁴C(O)C₁-C₁₈ alkyl, (C₀-C₈ alkyl)NR²⁴C(O)C₂-C₈ alkenyl, or (C₀-C₈ alkyl)NR²⁴C(O)C₂-C₁₈ alkynyl, (C₀-C₈ alkyl)NR²⁴C(O)OH, (C₀-C₈ alkyl)OC(O)OC₁-C₁₈ alkyl, (C₀-C₈ alkyl)OC(O)OC₂-C₁₈ alkenyl, (C₀-C₈ alkyl)OC(O)OC₂-C₁₈ alkynyl, (C₀-C₈ alkyl)OC(O)OH, (C₀-C₈ alkyl)OC(O)NR²⁴C₁-C₁₈ alkyl, (C₀-C₈ alkyl)OC(O)NR²⁴C₂-C₁₈ alkenyl, (C₀-C₈ alkyl)OC(O)NR²⁴C₂-C₁₈ alkynyl, (C₀-C₈ alkyl)OC(O)NR²⁴H₂, (C₀-C₈ alkyl)NR²⁴(O)OC₁-C₁₈ alkyl, (C₀-C₈ alkyl)NR²⁴(O)OC₂-C₁₈ alkenyl, (C₀-C₈ alkyl)NR²⁴(O)OC₂-C₁₈ alkynyl, or (C₀-C₈ alkyl)NR²⁴(O)OH;

[0181] R³ is hydrogen, (C₀-C₈ alkyl)halo, C₁-C₁₈ alkyl, C₂-C₁₈ alkenyl, C₂-C₁₈ alkynyl, heteroalkyl, (C₀-C₈ alkyl)aryl, (C₀-C₈ alkyl)heteroaryl, (C₀-C₈ alkyl)OC₁-C₁₈ alkyl, (C₀-C₈ alkyl)OC₂-C₁₈ alkenyl, (C₀-C₈ alkyl)OC₂-C₁₈ alkynyl, (C₀-C₈ alkyl)OH, (C₀-C₈ alkyl)SH, (C₀-C₈ alkyl)NR²⁴C₁-C₁₈ alkyl, (C₀-C₈ alkyl)NR²⁴C₂-C₁₈ alkenyl, (C₀-C₈ alkyl)NR²⁴C₂-C₁₈ alkynyl, (C₀-C₈ alkyl)NR²⁴H₂, (C₀-C₈ alkyl)C(O)C₁-C₁₈ alkyl, (C₀-C₈ alkyl)C(O)C₂-C₁₈ alkenyl, (C₀-C₈ alkyl)C(O)C₂-C₁₈ alkynyl, (C₀-C₈ alkyl)C(O)H, (C₀-C₈ alkyl)C(O)aryl, (C₀-C₈ alkyl)C(O)heteroaryl, (C₀-C₈ alkyl)C(O)OC₁-C₁₈ alkyl, (C₀-C₈ alkyl)C(O)OC₂-C₁₈ alkenyl, (C₀-C₈ alkyl)C(O)OC₂-C₁₈ alkynyl, (C₀-C₈ alkyl)C(O)OH, (C₀-C₈ alkyl)C(O)O aryl, (C₀-C₈ alkyl)C(O)O heteroaryl, (C₀-C₈ alkyl)OC(O)C₁-C₁₈ alkyl, (C₀-C₈ alkyl)OC(O)C₂-C₁₈ alkenyl, (C₀-C₈ alkyl)OC(O)C₂-C₁₈ alkynyl, (C₀-C₈ alkyl)C(O)NR²⁴C₁-C₁₈ alkyl, (C₀-C₈ alkyl)C(O)NR²⁴C₂-C₁₈ alkenyl, (C₀-C₈ alkyl)C(O)NR²⁴C₂-C₁₈ alkynyl, (C₀-C₈ alkyl)C(O)NR²⁴H₂, (C₀-C₈ alkyl)C(O)NR²⁴aryl, (C₀-C₈ alkyl)C(O)NR²⁴heteroaryl, (C₀-C₈ alkyl)NR²⁴C(O)C₁-C₁₈ alkyl, (C₀-C₈ alkyl)NR²⁴C(O)C₂-C₈ alkenyl, or (C₀-C₈ alkyl)NR²⁴C(O)C₂-C₁₈ alkynyl, (C₀-C₈ alkyl)NR²⁴C(O)OH, (C₀-C₈ alkyl)OC(O)OC₁-C₁₈ alkyl, (C₀-C₈ alkyl)OC(O)OC₂-C₁₈ alkenyl, (C₀-C₈ alkyl)OC(O)OC₂-C₁₈ alkynyl, (C₀-C₈ alkyl)OC(O)OH, (C₀-C₈ alkyl)OC(O)NR²⁴C₁-C₁₈ alkyl, (C₀-C₈ alkyl)OC(O)NR²⁴C₂-C₁₈ alkenyl, (C₀-C₈ alkyl)OC(O)NR²⁴C₂-C₁₈ alkynyl, (C₀-C₈ alkyl)OC(O)NR²⁴H₂, (C₀-C₈ alkyl)NR²⁴(O)OC₁-C₁₈ alkyl, (C₀-C₈ alkyl)NR²⁴(O)OC₂-C₁₈ alkenyl, (C₀-C₈ alkyl)NR²⁴(O)OC₂-C₁₈ alkynyl, or (C₀-C₈ alkyl)NR²⁴(O)OH;

[0182] R⁷ is hydrogen, C₁-C₁₈ alkyl, C₂-C₁₈ alkenyl, C₂-C₁₈ alkynyl, heteroalkyl, (C₀-C₈ alkyl)aryl, (C₀-C₈ alkyl)heteroaryl, (C₀-C₈ alkyl)C(O)C₁-C₁₈ alkyl, (C₀-C₈ alkyl)C(O)C₂-C₁₈ alkenyl, (C₀-C₈ alkyl)C(O)C₂-C₁₈ alkynyl, (C₀-C₈ alkyl)C(O)H, (C₀-C₈ alkyl)C(O)aryl, (C₀-C₈ alkyl)C(O)heteroaryl, (C₀-C₈ alkyl)C(O)OC₁-C₁₈ alkyl, (C₀-C₈ alkyl)C(O)OC₂-C₁₈ alkenyl, (C₀-C₈ alkyl)C(O)OC₂-C₁₈ alkynyl, (C₀-C₈ alkyl)C(O)OH, C₀-C₈ alkyl)C(O)O aryl, (C₀-C₈ alkyl)C(O)O heteroaryl, (C₀-C₈ alkyl)C(O)NR²⁴C₁-C₁₈ alkyl, (C₀-C₈ alkyl)C(O)NR²⁴C₂-C₁₈ alkenyl, (C₀-C₈ alkyl)C(O)NR²⁴C₂-C₁₈ alkynyl, (C₀-C₈ alkyl)C(O)NR²⁴H₂, (C₀-C₈ alkyl)C(O)NR²⁴aryl, or (C₀-C₈ alkyl)C(O)NR²⁴heteroaryl;

[0183] R¹⁰ is hydrogen, (C₀-C₈ alkyl)halo, C₁-C₁₈ alkyl, or (C₀-C₈ alkyl)OH; and

[0184] R²⁴ is hydrogen or C₁-C₁₈ alkyl.

[0185] In some embodiments, Y comprises a structure of Formula D, wherein

[0186] R² is hydrogen, halo, OH, or C₁-C₇ alkyl;

[0187] R³ is hydrogen, halo, OH, or C₁-C₇ alkyl;

[0188] R⁷ is hydrogen, C₁-C₈ alkyl, C₂-C₈ alkenyl, C₂-C₈ alkynyl, heteroalkyl, (C₀-C₈ alkyl)aryl, (C₀-C₈ alkyl)heteroaryl, (C₀ alkyl)C(O)C₁-C₈ alkyl, (C₀ alkyl)C(O)C₂-C₈ alkenyl, (C₀ alkyl)C(O)C₂-C₈ alkynyl, (C₀)C(O)aryl, (C₀)C(O)heteroaryl, (C₀)C(O)OC₁-C₈ alkyl, (C₀ alkyl)C(O)OC₂-C₈ alkenyl, (C₀ alkyl)C(O)OC₂-C₈ alkynyl, or (C₀ alkyl)C(O)OH;

[0189] R¹⁰ is hydrogen or OH; and

[0190] R²⁴ is hydrogen or C₁-C₇ alkyl.

[0191] For example, R² is hydrogen or methyl; R³ is hydrogen, fluoro, chloro, or methyl; R⁷ is hydrogen, C(O)CH₃, or C(O)CH₂CH₃; and R¹⁰ is hydroxyl.

Nonlimiting examples of compounds of Formula D include:

[chemical structure]

and derivatives thereof.

[0192] In embodiments wherein Y comprises a structure of Formula D, Y is conjugated to L (e.g. when L is a linking group) or Q (e.g. when L is a bond) at any position of Formula D that is capable of reacting with Q or L. One skilled in the art could readily determine the position of conjugation on Formula D and means of conjugation of Formula D to Q or L in view of general knowledge and the disclosure provided herein. In some embodiments, Formula D is conjugated to L or Q at any of positions 1, 2, 3, 4, 5, 6, 7, 8, 9, 10, 11, 12, 13, 14, 15, 16, 17, 18, 19, 20, 21, 22, 23, or 24 of Formula D. In some embodiments, Formula D is conjugated to L or Q at position 3, 10, 13, or 17 of Formula D.

[0193] In some embodiments, Y acts at a progesterone receptor (PR). In some embodiments, Y comprises any structure that permits or promotes agonist activity at the PR, while in other embodiments Y is an antagonist of PR. In exemplary embodiments, Y comprises a structure of Formula E:

[chemical structure]

wherein R², R³, R⁴, and R⁷ are each independently moieties that permit or promote agonist or antagonist activity upon binding of the compound of Formula E to the PR; and the dashed line indicates an optional double bond. In some embodiments, Formula E further comprises one or more substituents at one or more of positions 1, 2, 4, 5, 6, 7, 8, 11, 12, 14, 15, 16, and 17 (e.g. a methyl group at position 6).

[0194] In some embodiments, Y comprises a structure of Formula E wherein

[0195] R² is hydrogen, (C₀-C₁₈ alkyl)halo, C₁-C₁₈ alkyl, C₂-C₁₈ alkenyl, C₂-C₁₈ alkynyl, heteroalkyl, (C₀-C₈ alkyl)aryl, (C₀-C₈ alkyl)heteroaryl, (C₀-C₈ alkyl)OC₁-C₁₈ alkyl, (C₀-C₈ alkyl)OC₂-C₁₈ alkenyl, (C₀-C₈ alkyl)OC₂-C₁₈ alkynyl, (C₀-C₈ alkyl)OH, (C₀-C₈ alkyl)SH, (C₀-C₈ alkyl)NR²⁴C₁-C₁₈ alkyl, (C₀-C₈ alkyl)NR²⁴C₂-C₁₈ alkenyl, (C₀-C₈ alkyl)NR²⁴C₂-C₁₈ alkynyl, (C₀-C₈ alkyl)NR²⁴H₂, (C₀-C₈ alkyl)C(O)C₁-C₁₈ alkyl, (C₀-C₈ alkyl)C(O)C₂-C₁₈ alkenyl, (C₀-C₈ alkyl)C(O)C₂-C₁₈ alkynyl, (C₀-C₈ alkyl)C(O)H, (C₀-C₈ alkyl)C(O)aryl, (C₀-C₈ alkyl)C(O)heteroaryl, (C₀-C₈ alkyl)C(O)OC₁-C₁₈ alkyl, (C₀-C₈ alkyl)C(O)OC₂-C₁₈ alkenyl, (C₀-C₈ alkyl)C(O)OC₂-C₁₈ alkynyl, (C₀-C₈ alkyl)C(O)OH, (C₀-C₈ alkyl)C(O)O aryl, (C₀-C₈ alkyl)C(O)O heteroaryl, (C₀-C₈ alkyl)OC(O)C₁-C₁₈ alkyl, (C₀-C₈ alkyl)OC(O)C₂-C₁₈ alkenyl, (C₀-C₈ alkyl)OC(O)C₂-C₁₈ alkynyl, (C₀-C₈ alkyl)C(O)NR²⁴C₁-C₁₈ alkyl, (C₀-C₈ alkyl)C(O)NR²⁴C₂-C₁₈ alkenyl, (C₀-C₈ alkyl)C(O)NR²⁴C₂-C₁₈ alkynyl, (C₀-C₈ alkyl)C(O)NR²⁴H₂, (C₀-C₈ alkyl)C(O)NR²⁴aryl, (C₀-C₈ alkyl)C(O)NR²⁴heteroaryl, (C₀-C₈ alkyl)NR²⁴C(O)C₁-C₁₈ alkyl, (C₀-C₈ alkyl)NR²⁴C(O)C₂-C₈ alkenyl, or (C₀-C₈ alkyl)NR²⁴C(O)C₂-C₁₈ alkynyl, (C₀-C₈ alkyl)NR²⁴C(O)OH, (C₀-C₈ alkyl)OC(O)OC₁-C₁₈ alkyl, (C₀-C₈ alkyl)OC(O)OC₂-C₁₈ alkenyl, (C₀-C₈ alkyl)OC(O)OC₂-C₁₈ alkynyl, (C₀-C₈ alkyl)OC(O)OH, (C₀-C₈ alkyl)OC(O)NR²⁴C₁-C₁₈ alkyl, (C₀-C₈ alkyl)OC(O)NR²⁴C₂-C₁₈ alkenyl, (C₀-C₈ alkyl)OC(O)NR²⁴C₂-C₁₈ alkynyl, (C₀-C₈ alkyl)OC(O)NR²⁴H₂, (C₀-C₈ alkyl)NR²⁴(O)OC₁-C₁₈ alkyl, (C₀-C₈ alkyl)NR²⁴(O)OC₂-C₁₈ alkenyl, (C₀-C₈ alkyl)NR²⁴(O)OC₂-C₁₈ alkynyl, or (C₀-C₈ alkyl)NR²⁴(O)OH; R²⁴ is hydrogen or C₁-C₁₈ alkyl.

[0196] R³ is hydrogen, (C₀-C₈ alkyl)halo, C₁-C₁₈ alkyl, C₂-C₁₈ alkenyl, C₂-C₁₈ alkynyl, heteroalkyl, (C₀-C₈ alkyl)aryl, (C₀-C₈ alkyl)heteroaryl, (C₀-C₈ alkyl)OC₁-C₁₈ alkyl, (C₀-C₈ alkyl)OC₂-C₁₈ alkenyl, (C₀-C₈ alkyl)OC₂-C₁₈ alkynyl, (C₀-C₈ alkyl)OH, (C₀-C₈ alkyl)SH, (C₀-C₈ alkyl)NR²⁴C₁-C₁₈ alkyl, (C₀-C₈ alkyl)NR²⁴C₂-C₁₈ alkenyl, (C₀-C₈ alkyl)NR²⁴C₂-C₁₈ alkynyl, (C₀-C₈ alkyl)NR²⁴H₂, (C₀-C₈ alkyl)C(O)C₁-C₁₈ alkyl, (C₀-C₈ alkyl)C(O)C₂-C₁₈ alkenyl, (C₀-C₈ alkyl)C(O)C₂-C₁₈ alkynyl, (C₀-C₈ alkyl)C(O)H, (C₀-C₈ alkyl)C(O)aryl, (C₀-C₈ alkyl)C(O)heteroaryl, (C₀-C₈ alkyl)C(O)OC₁-C₁₈ alkyl, (C₀-C₈ alkyl)C(O)OC₂-C₁₈ alkenyl, (C₀-C₈ alkyl)C(O)OC₂-C₁₈ alkynyl, (C₀-C₈ alkyl)C(O)OH, (C₀-C₈ alkyl)C(O)O aryl, (C₀-C₈ alkyl)C(O)O heteroaryl, (C₀-C₈ alkyl)OC(O)C₁-C₁₈ alkyl, (C₀-C₈ alkyl)OC(O)C₂-C₁₈ alkenyl, (C₀-C₈ alkyl)OC(O)C₂-C₁₈ alkynyl, (C₀-C₈ alkyl)C(O)NR²⁴C₁-C₁₈ alkyl, (C₀-C₈ alkyl)C(O)NR²⁴C₂-C₁₈ alkenyl, (C₀-C₈ alkyl)C(O)NR²⁴C₂-C₁₈ alkynyl, (C₀-C₈ alkyl)C(O)NR²⁴H₂, (C₀-C₈ alkyl)C(O)NR²⁴aryl, (C₀-C₈ alkyl)C(O)NR²⁴heteroaryl, (C₀-C₈ alkyl)NR²⁴C(O)C₁-C₁₈ alkyl, (C₀-C₈ alkyl)NR²⁴C(O)C₂-C₈ alkenyl, or (C₀-C₈ alkyl)NR²⁴C(O)C₂-C₁₈ alkynyl, (C₀-C₈ alkyl)NR²⁴C(O)OH, (C₀-C₈ alkyl)OC(O)OC₁-C₁₈ alkyl, (C₀-C₈ alkyl)OC(O)OC₂-C₁₈ alkenyl, (C₀-C₈ alkyl)OC(O)OC₂-C₁₈ alkynyl, (C₀-C₈ alkyl)OC(O)OH, (C₀-C₈ alkyl)OC(O)NR²⁴C₁-C₁₈ alkyl, (C₀-C₈ alkyl)OC(O)NR²⁴C₂-C₁₈ alkenyl, (C₀-C₈ alkyl)OC(O)NR²⁴C₂-C₁₈ alkynyl, (C₀-C₈ alkyl)OC(O)NR²⁴H₂, (C₀-C₈ alkyl)NR²⁴(O)OC₁-C₁₈ alkyl, (C₀-C₈ alkyl)NR²⁴(O)OC₂-C₁₈ alkenyl, (C₀-C₈ alkyl)NR²⁴(O)OC₂-C₁₈ alkynyl, or (C₀-C₈ alkyl)NR²⁴(O)OH;

[0197] R⁴ is hydrogen, (C₀-C₈ alkyl)halo, C₁-C₁₈ alkyl, C₂-C₁₈ alkenyl, C₂-C₁₈ alkynyl, heteroalkyl, (C₀-C₈ alkyl)aryl, (C₀-C₈ alkyl)heteroaryl, (C₀-C₈ alkyl)OC₁-C₁₈ alkyl, (C₀-C₈ alkyl)OC₂-C₁₈ alkenyl, (C₀-C₈ alkyl)OC₂-C₁₈ alkynyl, (C₀-C₈ alkyl)OH, (C₀-C₈ alkyl)SH, (C₀-C₈ alkyl)NR²⁴C₁-C₁₈ alkyl, (C₀-C₈ alkyl)NR²⁴C₂-C₁₈ alkenyl, (C₀-C₈ alkyl)NR²⁴C₂-C₁₈ alkynyl, (C₀-C₈ alkyl)NR²⁴H₂, (C₀-C₈ alkyl)C(O)C₁-C₁₈ alkyl, (C₀-C₈ alkyl)C(O)C₂-C₁₈ alkenyl, (C₀-C₈ alkyl)C(O)C₂-C₁₈ alkynyl, (C₀-C₈ alkyl)C(O)H, (C₀-C₈ alkyl)C(O)aryl, (C₀-C₈ alkyl)C(O)heteroaryl, (C₀-C₈ alkyl)C(O)OC₁-C₁₈ alkyl, (C₀-C₈ alkyl)C(O)OC₂-C₁₈ alkenyl, (C₀-C₈ alkyl)C(O)OC₂-C₁₈ alkynyl, (C₀-C₈ alkyl)C(O)OH, (C₀-C₈ alkyl)C(O)O aryl, (C₀-C₈ alkyl)C(O)O heteroaryl, (C₀-C₈ alkyl)OC(O)C₁-C₁₈ alkyl, (C₀-C₈ alkyl)OC(O)C₂-C₁₈ alkenyl, (C₀-C₈ alkyl)OC(O)C₂-C₁₈ alkynyl, (C₀-C₈ alkyl)C(O)NR²⁴C₁-C₁₈ alkyl, (C₀-C₈ alkyl)C(O)NR²⁴C₂-C₁₈ alkenyl, (C₀-C₈ alkyl)C(O)NR²⁴C₂-C₁₈ alkynyl, (C₀-C₈ alkyl)C(O)NR²⁴H₂, (C₀-C₈ alkyl)C(O)NR²⁴aryl, (C₀-C₈ alkyl)C(O)NR²⁴heteroaryl, (C₀-C₈ alkyl)NR²⁴C(O)C₁-C₁₈ alkyl, (C₀-C₈ alkyl)NR²⁴C(O)C₂-C₈ alkenyl, or (C₀-C₈ alkyl)NR²⁴C(O)C₂-C₁₈ alkynyl, (C₀-C₈ alkyl)NR²⁴C(O)OH, (C₀-C₈ alkyl)OC(O)OC₁-C₁₈ alkyl, (C₀-C₈ alkyl)OC(O)OC₂-C₁₈ alkenyl, (C₀-C₈ alkyl)OC(O)OC₂-C₁₈ alkynyl, (C₀-C₈ alkyl)OC(O)OH, (C₀-C₈ alkyl)OC(O)NR²⁴C₁-C₁₈ alkyl, (C₀-C₈ alkyl)OC(O)NR²⁴C₂-C₁₈ alkenyl, (C₀-C₈ alkyl)OC(O)NR²⁴C₂-C₁₈ alkynyl, (C₀-C₈ alkyl)OC(O)NR²⁴H₂, (C₀-C₈ alkyl)NR²⁴(O)OC₁-C₁₈ alkyl, (C₀-C₈ alkyl)NR²⁴(O)OC₂-C₁₈ alkenyl, (C₀-C₈ alkyl)NR²⁴(O)OC₂-C₁₈ alkynyl, or (C₀-C₈ alkyl)NR²⁴(O)OH;

[0198] R⁷ is hydrogen, C₁-C₁₈ alkyl, C₂-C₁₈ alkenyl, C₂-C₁₈ alkynyl, heteroalkyl, (C₀-C₈ alkyl)aryl, (C₀-C₈ alkyl)heteroaryl, (C₀-C₈ alkyl)C(O)C₁-C₁₈ alkyl, (C₀-C₈ alkyl)C(O)C₂-C₁₈ alkenyl, (C₀-C₈ alkyl)C(O)C₂-C₁₈ alkynyl, (C₀-C₈ alkyl)C(O)H, (C₀-C₈ alkyl)C(O)aryl, (C₀-C₈ alkyl)C(O)heteroaryl, (C₀-C₈ alkyl)C(O)OC₁-C₁₈ alkyl, (C₀-C₈ alkyl)C(O)OC₂-C₁₈ alkenyl, (C₀-C₈ alkyl)C(O)OC₂-C₁₈ alkynyl, (C₀-C₈ alkyl)C(O)OH, C₀-C₈ alkyl)C(O)O aryl, (C₀-C₈ alkyl)C(O)O heteroaryl, (C₀-C₈ alkyl)C(O)NR²⁴C₁-C₁₈ alkyl, (C₀-C₈ alkyl)C(O)NR²⁴C₂-C₁₈ alkenyl, (C₀-C₈ alkyl)C(O)NR²⁴C₂-C₁₈ alkynyl, (C₀-C₈ alkyl)C(O)NR²⁴H₂, (C₀-C₈ alkyl)C(O)NR²⁴aryl, or (C₀-C₈ alkyl)C(O)NR²⁴heteroaryl; and

[0199] R²⁴ is hydrogen or C₁-C₁₈ alkyl.

[0200] In some embodiments, Y comprises a structure of Formula E, wherein

[0201] R² is hydrogen, halo, OH, or C₁-C₇ alkyl;

[0202] R³ is hydrogen, halo, OH, or C₁-C₇ alkyl;

[0203] R⁴ is hydrogen, (C₀-C₈ alkyl)halo, C₁-C₈ alkyl, C₂-C₈ alkenyl, C₂₋₁₈ alkynyl, heteroalkyl, (C₀-C₈ alkyl)aryl, (C₀-C₈ alkyl)heteroaryl, (C₀-C₈ alkyl)OC₁-C₈ alkyl, (C₀-C₈ alkyl)OC₂-C₈ alkenyl, (C₀-C₈ alkyl)OC₂-C₈ alkynyl, (C₀-C₈ alkyl)OH, (C₀-C₈ alkyl)SH, (C₀-C₈ alkyl)NR²⁴C₁-C₈ alkyl, (C₀-C₈ alkyl)NR²⁴C₂-C₈ alkenyl, (C₀-C₈ alkyl)NR²⁴C₂-C₈ alkynyl, (C₀-C₈ alkyl)NR²⁴H₂, (C₀-C₈ alkyl)C(O)C₁-C₈ alkyl, (C₀-C₈ alkyl)C(O)C₂-C₈ alkenyl, (C₀-C₈ alkyl)C(O)C₂-C₈ alkynyl, (C₀-C₈ alkyl)C(O)H, (C₀-C₈ alkyl)C(O)aryl, (C₀-C₈ alkyl)C(O)heteroaryl, (C₀-C₈ alkyl)C(O)OC₁-C₈ alkyl, (C₀-C₈ alkyl)C(O)OC₂-C₈ alkenyl, (C₀-C₈ alkyl)C(O)OC₂-C₈ alkynyl, (C₀-C₈ alkyl)C(O)OH, (C₀-C₈ alkyl)C(O)O aryl, (C₀-C₈ alkyl)C(O)O heteroaryl, (C₀-C₈ alkyl)OC(O)C₁-C₈ alkyl, (C₀-C₈ alkyl)OC(O)C₂-C₈ alkenyl, (C₀-C₈ alkyl)OC(O)C₂-C₁₈ alkynyl, (C₀-C₈ alkyl)C(O)NR²⁴C₁-C₈ alkyl, (C₀-C₈ alkyl)C(O)NR²⁴C₂-C₈ alkenyl, (C₀-C₈ alkyl)C(O)NR²⁴C₂-C₈ alkynyl, (C₀-C₈ alkyl)C(O)NR²⁴H₂, (C₀-C₈ alkyl)C(O)NR²⁴aryl, (C₀-C₈ alkyl)C(O)NR²⁴heteroaryl, (C₀-C₈ alkyl)NR²⁴C(O)C₁-C₈ alkyl, (C₀-C₈ alkyl)NR²⁴C(O)C₂-C₈ alkenyl, or (C₀-C₈ alkyl)NR²⁴C(O)C₂-C₈ alkynyl, (C₀-C₈ alkyl)NR²⁴C(O)OH, (C₀-C₈ alkyl)OC(O)OC₁-C₈ alkyl, (C₀-C₈ alkyl)OC(O)OC₂-C₈ alkenyl, (C₀-C₈ alkyl)OC(O)OC₂-C₈ alkynyl, (C₀-C₈ alkyl)OC(O)OH, (C₀-C₈ alkyl)OC(O)NR²⁴C₁-C₈ alkyl, (C₀-C₈ alkyl)OC(O)NR²⁴C₂-C₈ alkenyl, (C₀-C₈ alkyl)OC(O)NR²⁴C₂-C₈ alkynyl, (C₀-C₈ alkyl)OC(O)NR²⁴H₂, (C₀-C₈ alkyl)NR²⁴(O)OC₁₈ alkyl, (C₀-C₈ alkyl)NR²⁴(O)OC₂-C₈ alkenyl, (C₀-C₈ alkyl)NR²⁴(O)OC₂-C₈ alkynyl, or (C₀-C₈ alkyl)NR²⁴(O)OH;

[0204] R⁷ is hydrogen, C₁-C₈ alkyl, C₂-C₈ alkenyl, C₂-C₈ alkynyl, heteroalkyl, (C₀-C₈ alkyl)aryl, (C₀-C₈ alkyl)heteroaryl, (C₀ alkyl)C(O)C₁-C₈ alkyl, (C₀ alkyl)C(O)C₂-C₈ alkenyl, (C₀ alkyl)C(O)C₂-C₈ alkynyl, (C₀)C(O)aryl, (C₀)C(O)heteroaryl, (C₀)C(O)OC₁-C₈ alkyl, (C₀ alkyl)C(O)OC₂-C₈ alkenyl, (C₀ alkyl)C(O)OC₂-C₈ alkynyl, or (C₀ alkyl)C(O)OH; and

[0205] R²⁴ is hydrogen or C₁-C₇ alkyl.

[0206] For example, R² is hydrogen or methyl; R³ is hydrogen or methyl; R⁴ is (C₁ alkyl)C(O)C₁-C₄ alkyl, acetate, cypionate, hemisucciniate, enanthate, or propionate; and R⁷ is hydrogen, C(O)CH₃, or C(O)CH₂CH₃.

[0207] Nonlimiting examples of compounds of Formula E include:

[chemical structure]

and derivatives thereof.

[0208] In embodiments wherein Y comprises a structure of Formula E, Y is conjugated to L (e.g. when L is a linking group) or Q (e.g. when L is a bond) at any position of Formula E that is capable of reacting with Q or L. One skilled in the art could readily determine the position of conjugation on Formula E and means of conjugation of Formula E to Q or L in view of general knowledge and the disclosure provided herein. In some embodiments, Formula E is conjugated to L or Q at any of positions 1, 2, 3, 4, 5, 6, 7, 8, 9, 10, 11, 12, 13, 14, 15, 16, 17, 18, 19, 20, 21, 22, 23, or 24 of Formula E. In some embodiments, Formula E is conjugated to L or Q through position 3 or 17 of Formula E.

[0209] In other embodiments, Y acts at a progesterone receptor but is not is not encompassed by Formula E. For example, Y can comprise the below structure and analogs thereof:

[chemical structure]

[0210] In some embodiments, Y acts at an androgen receptor (AR). In some embodiments, Y comprises any structure that permits or promotes agonist activity at the AR, while in other embodiments Y is an antagonist of AR. In exemplary embodiments, Y comprises a structure of Formula F:

[chemical structure]

wherein R¹, when present, R², R³ and R⁶ are each independently a moiety that permits or promotes agonist or antagonist activity upon binding of the compound of Formula F to the AR; and each dashed line represents an optional double bond, with the proviso that no more than one of the optional carbon-carbon double bond is present at position 5. In some embodiments, Formula F further comprises one or more substituents at one or more of positions 1, 2, 4, 5, 6, 7, 8, 11, 12, 14, 15, 16, and 17.

[0211] In some embodiments, Y comprises a structure of Formula F wherein

[0212] R¹ is present and is hydrogen, C₁-C₁₈ alkyl, C₂-C₁₈ alkenyl, C₂-C₁₈ alkynyl, heteroalkyl, (C₀-C₈ alkyl)aryl, (C₀-C₈ alkyl)heteroaryl, (C₀-C₈ alkyl)C(O)C₁-C₁₈ alkyl, (C₀-C₈ alkyl)C(O)C₂-C₁₈ alkenyl, (C₀-C₈ alkyl)C(O)C₂-C₁₈ alkynyl, (C₀-C₈ alkyl)C(O)H, (C₀-C₈ alkyl)C(O)aryl, (C₀-C₈ alkyl)C(O)heteroaryl, (C₀-C₈ alkyl)C(O)OC₁-C₁₈ alkyl, (C₀-C₈ alkyl)C(O)OC₂-C₁₈ alkenyl, (C₀-C₈ alkyl)C(O)OC₂-C₁₈ alkynyl, (C₀-C₈ alkyl)C(O)OH, C₀-C₈ alkyl)C(O)O aryl, (C₀-C₈ alkyl)C(O)O heteroaryl, (C₀-C₈ alkyl)C(O)NR²⁴C₁-C₁₈ alkyl, (C₀-C₈ alkyl)C(O)NR²⁴C₂-C₁₈ alkenyl, (C₀-C₈ alkyl)C(O)NR²⁴C₂-C₁₈ alkynyl, (C₀-C₈ alkyl)C(O)NR²⁴H₂, (C₀-C₈ alkyl)C(O)NR²⁴aryl, (C₀-C₈ alkyl)C(O)NR²⁴heteroaryl, or SO₃H;

[0213] R² is hydrogen, (C₀-C₈ alkyl)halo, C₁-C₁₈ alkyl, C₂-C₁₈ alkenyl, C₂-C₁₈ alkynyl, heteroalkyl, (C₀-C₈ alkyl)aryl, (C₀-C₈ alkyl)heteroaryl, (C₀-C₈ alkyl)OC₁-C₁₈ alkyl, (C₀-C₈ alkyl)OC₂-C₁₈ alkenyl, (C₀-C₈ alkyl)OC₂-C₁₈ alkynyl, (C₀-C₈ alkyl)OH, (C₀-C₈ alkyl)SH, (C₀-C₈ alkyl)NR²⁴C₁-C₁₈ alkyl, (C₀-C₈ alkyl)NR²⁴C₂-C₁₈ alkenyl, (C₀-C₈ alkyl)NR²⁴C₂-C₁₈ alkynyl, (C₀-C₈ alkyl)NR²⁴H₂, (C₀-C₈ alkyl)C(O)C₁-C₁₈ alkyl, (C₀-C₈ alkyl)C(O)C₂-C₁₈ alkenyl, (C₀-C₈ alkyl)C(O)C₂-C₁₈ alkynyl, (C₀-C₈ alkyl)C(O)H, (C₀-C₈ alkyl)C(O)aryl, (C₀-C₈ alkyl)C(O)heteroaryl, (C₀-C₈ alkyl)C(O)OC₁-C₁₈ alkyl, (C₀-C₈ alkyl)C(O)OC₂-C₁₈ alkenyl, (C₀-C₈ alkyl)C(O)OC₂-C₁₈ alkynyl, (C₀-C₈ alkyl)C(O)OH, (C₀-C₈ alkyl)C(O)O aryl, (C₀-C₈ alkyl)C(O)O heteroaryl, (C₀-C₈ alkyl)OC(O)C₁-C₁₈ alkyl, (C₀-C₈ alkyl)OC(O)C₂-C₁₈ alkenyl, (C₀-C₈ alkyl)OC(O)C₂-C₁₈ alkynyl, (C₀-C₈ alkyl)C(O)NR²⁴C₁-C₁₈ alkyl, (C₀-C₈ alkyl)C(O)NR²⁴C₂-C₁₈ alkenyl, (C₀-C₈ alkyl)C(O)NR²⁴C₂-C₁₈ alkynyl, (C₀-C₈ alkyl)C(O)NR²⁴H₂, (C₀-C₈ alkyl)C(O)NR²⁴aryl, (C₀-C₈ alkyl)C(O)NR²⁴heteroaryl, (C₀-C₈ alkyl)NR²⁴C(O)C₁-C₁₈ alkyl, (C₀-C₈ alkyl)NR²⁴C(O)C₂-C₈ alkenyl, or (C₀-C₈ alkyl)NR²⁴C(O)C₂-C₁₈ alkynyl, (C₀-C₈ alkyl)NR²⁴C(O)OH, (C₀-C₈ alkyl)OC(O)OC₁-C₁₈ alkyl, (C₀-C₈ alkyl)OC(O)OC₂-C₁₈ alkenyl, (C₀-C₈ alkyl)OC(O)OC₂-C₁₈ alkynyl, (C₀-C₈ alkyl)OC(O)OH, (C₀-C₈ alkyl)OC(O)NR²⁴C₁-C₁₈ alkyl, (C₀-C₈ alkyl)OC(O)NR²⁴C₂-C₁₈ alkenyl, (C₀-C₈ alkyl)OC(O)NR²⁴C₂-C₁₈ alkynyl, (C₀-C₈ alkyl)OC(O)NR²⁴H₂, (C₀-C₈ alkyl)NR²⁴(O)OC₁-C₁₈ alkyl, (C₀-C₈ alkyl)NR²⁴(O)OC₂-C₁₈ alkenyl, (C₀-C₈ alkyl)NR²⁴(O)OC₂-C₁₈ alkynyl, or (C₀-C₈ alkyl)NR²⁴(O)OH;

[0214] R³ is hydrogen, (C₀-C₈ alkyl)halo, C₁-C₁₈ alkyl, C₂-C₁₈ alkenyl, C₂-C₁₈ alkynyl, heteroalkyl, (C₀-C₈ alkyl)aryl, (C₀-C₈ alkyl)heteroaryl, (C₀-C₈ alkyl)OC₁-C₁₈ alkyl, (C₀-C₈ alkyl)OC₂-C₁₈ alkenyl, (C₀-C₈ alkyl)OC₂-C₁₈ alkynyl, (C₀-C₈ alkyl)OH, (C₀-C₈ alkyl)SH, (C₀-C₈ alkyl)NR²⁴C₁-C₁₈ alkyl, (C₀-C₈ alkyl)NR²⁴C₂-C₁₈ alkenyl, (C₀-C₈ alkyl)NR²⁴C₂-C₁₈ alkynyl, (C₀-C₈ alkyl)NR²⁴H₂, (C₀-C₈ alkyl)C(O)C₁-C₁₈ alkyl, (C₀-C₈ alkyl)C(O)C₂-C₁₈ alkenyl, (C₀-C₈ alkyl)C(O)C₂-C₁₈ alkynyl, (C₀-C₈ alkyl)C(O)H, (C₀-C₈ alkyl)C(O)aryl, (C₀-C₈ alkyl)C(O)heteroaryl, (C₀-C₈ alkyl)C(O)OC₁-C₁₈ alkyl, (C₀-C₈ alkyl)C(O)OC₂-C₁₈ alkenyl, (C₀-C₈ alkyl)C(O)OC₂-C₁₈ alkynyl, (C₀-C₈ alkyl)C(O)OH, (C₀-C₈ alkyl)C(O)O aryl, (C₀-C₈ alkyl)C(O)O heteroaryl, (C₀-C₈ alkyl)OC(O)C₁-C₁₈ alkyl, (C₀-C₈ alkyl)OC(O)C₂-C₁₈ alkenyl, (C₀-C₈ alkyl)OC(O)C₂-C₁₈ alkynyl, (C₀-C₈ alkyl)C(O)NR²⁴C₁-C₁₈ alkyl, (C₀-C₈ alkyl)C(O)NR²⁴C₂-C₁₈ alkenyl, (C₀-C₈ alkyl)C(O)NR²⁴C₂-C₁₈ alkynyl, (C₀-C₈ alkyl)C(O)NR²⁴H₂, (C₀-C₈ alkyl)C(O)NR²⁴aryl, (C₀-C₈ alkyl)C(O)NR²⁴heteroaryl, (C₀-C₈ alkyl)NR²⁴C(O)C₁-C₁₈ alkyl, (C₀-C₈ alkyl)NR²⁴C(O)C₂-C₈ alkenyl, or (C₀-C₈ alkyl)NR²⁴C(O)C₂-C₁₈ alkynyl, (C₀-C₈ alkyl)NR²⁴C(O)OH, (C₀-C₈ alkyl)OC(O)OC₁-C₁₈ alkyl, (C₀-C₈ alkyl)OC(O)OC₂-C₁₈ alkenyl, (C₀-C₈ alkyl)OC(O)OC₂-C₁₈ alkynyl, (C₀-C₈ alkyl)OC(O)OH, (C₀-C₈ alkyl)OC(O)NR²⁴C₁-C₁₈ alkyl, (C₀-C₈ alkyl)OC(O)NR²⁴C₂-C₁₈ alkenyl, (C₀-C₈ alkyl)OC(O)NR²⁴C₂-C₁₈ alkynyl, (C₀-C₈ alkyl)OC(O)NR²⁴H₂, (C₀-C₈ alkyl)NR²⁴(O)OC₁-C₁₈ alkyl, (C₀-C₈ alkyl)NR²⁴(O)OC₂-C₁₈ alkenyl, (C₀-C₈ alkyl)NR²⁴(O)OC₂-C₁₈ alkynyl, or (C₀-C₈ alkyl)NR²⁴(O)OH;

[0215] R⁶ is hydrogen, C₁-C₁₈ alkyl, C₂-C₁₈ alkenyl, C₂-C₁₈ alkynyl, heteroalkyl, (C₀-C₈ alkyl)aryl, (C₀-C₈ alkyl)heteroaryl, (C₀-C₈ alkyl)C(O)C₁-C₁₈ alkyl, (C₀-C₈ alkyl)C(O)C₂-C₁₈ alkenyl, (C₀-C₈ alkyl)C(O)C₂-C₁₈ alkynyl, (C₀-C₈ alkyl)C(O)H, (C₀-C₈ alkyl)C(O)aryl, (C₀-C₈ alkyl)C(O)heteroaryl, (C₀-C₈ alkyl)C(O)OC₁-C₁₈ alkyl, (C₀-C₈ alkyl)C(O)OC₂-C₁₈ alkenyl, (C₀-C₈ alkyl)C(O)OC₂-C₁₈ alkynyl, (C₀-C₈ alkyl)C(O)OH, C₀-C₈ alkyl)C(O)O aryl, (C₀-C₈ alkyl)C(O)O heteroaryl, (C₀-C₈ alkyl)C(O)NR²⁴C₁-C₁₈ alkyl, (C₀-C₈ alkyl)C(O)NR²⁴C₂-C₁₈ alkenyl, (C₀-C₈ alkyl)C(O)NR²⁴C₂-C₁₈ alkynyl, (C₀-C₈ alkyl)C(O)NR²⁴H₂, (C₀-C₈ alkyl)C(O)NR²⁴aryl, (C₀-C₈ alkyl)C(O)NR²⁴heteroaryl, or SO₃H; and

[0216] R²⁴ is hydrogen or C₁-C₁₈ alkyl.

[0217] In some embodiments, Y comprises a structure of Formula E, wherein

[0218] R¹ is hydrogen, C₁-C₇ alkyl; (C₀-C₃ alkyl)C(O)C₁-C₇ alkyl, (C₀-C₃ alkyl)C(O)aryl, or SO₃H;

[0219] R² is hydrogen, halo, OH, or C₁-C₇ alkyl;

[0220] R³ is hydrogen, halo, OH, or C₁-C₇ alkyl;

[0221] R⁶ is hydrogen, C₁-C₈ alkyl, C₂-C₈ alkenyl, C₂-C₈ alkynyl, heteroalkyl, (C₀-C₈ alkyl)aryl, (C₀-C₈ alkyl)heteroaryl, (C₀-C₈ alkyl)C(O)C₁-C₈ alkyl, (C₀-C₈ alkyl)C(O)C₂-C₈ alkenyl, (C₀-C₈ alkyl)C(O)C₂-C₈ alkynyl, (C₀-C₈ alkyl)C(O)H, (C₀-C₈ alkyl)C(O)aryl, (C₀-C₈ alkyl)C(O)heteroaryl, (C₀-C₈ alkyl)C(O)OC₁-C₈ alkyl, (C₀-C₈ alkyl)C(O)OC₂-C₈ alkenyl, (C₀-C₈ alkyl)C(O)OC₂-C₈ alkynyl, (C₀-C₈ alkyl)C(O)OH, C₀-C₈ alkyl)C(O)O aryl, (C₀-C₈ alkyl)C(O)O heteroaryl, (C₀-C₈ alkyl)C(O)NR²⁴C₁-C₈ alkyl, (C₀-C₈ alkyl)C(O)NR²⁴C₂-C₈ alkenyl, (C₀-C₈ alkyl)C(O)NR²⁴C₂-C₈ alkynyl, (C₀-C₈ alkyl)C(O)NR²⁴H₂, (C₀-C₈ alkyl)C(O)NR²⁴aryl, or (C₀-C₈ alkyl)C(O)NR²⁴heteroaryl; and

[0222] R²⁴ is hydrogen or C₁-C₇ alkyl.

[0223] For example, R¹ is hydrogen or absent; R² is hydrogen or methyl; R³ is hydrogen or methyl; and R⁶ is H or absent.

[0224] Nonlimiting examples of compounds of Formula F include:

[chemical structure]

and derivatives thereof.

[0225] In embodiments wherein Y comprises a structure of Formula F, Y is conjugated to L (e.g. when L is a linking group) or Q (e.g. when L is a bond) at any position of Formula F that is capable of reacting with Q or L. One skilled in the art could readily determine the position of conjugation on Formula F and means of conjugation of Formula F to Q or L in view of general knowledge and the disclosure provided herein. In some embodiments, Formula F is conjugated to L or Q at any of positions 1, 2, 3, 4, 5, 6, 7, 8, 9, 10, 11, 12, 13, 14, 15, 16, 17, 18, 19, 20, 21, or 22 of Formula F. In some embodiments, Formula F is conjugated to L or Q at position 3 or 17 of Formula F.

[0226] In some embodiments, the binding of the NHR ligand to the Type I nuclear hormone receptor results in agonist activity (or antagonist activity) in some but not all cells or tissues expressing the Type I nuclear hormone receptor.

NHR Ligand that Acts on a Type II Nuclear Hormone Receptor

[0227] In some embodiments of the invention, the NHR ligand (Y) acts on a Type II nuclear hormone receptor. In some embodiments, Y can have any structure that permits or promotes agonist activity upon binding of the ligand to a Type II nuclear hormone receptor, while in other embodiments Y is an antagonist of the Type II nuclear hormone receptor. In exemplary embodiments, Y exhibits agonist (or antagonist) activity at a thyroid hormone receptor (TR), retinoic acid receptor (RAR), peroxisome proliferator activated receptor (PPAR), Liver X Receptor (LXR), farnesoid X receptor (FXR), vitamin D receptor (VDR), and/or pregnane X receptor (PXR).

[0228] In some embodiments, Y acts at a thyroid hormone receptor (e.g. TRα, TRβ). In some embodiments, Y comprises any structure that permits or promotes agonist activity at the TR, while in other embodiments Y is an antagonist of TR. Nonlimiting examples of Y include the following compounds:

[chemical structure]

and derivatives thereof.

[0229] In embodiments wherein Y comprises a structure that permits or promotes agonist or antagonist activity at a TR, Y is conjugated to L (e.g. when L is a linking group) or Q (e.g. when L is a bond) at any position of Y that is capable of reacting with Q or L. One skilled in the art could readily determine the position of conjugation on Y and means of conjugation of Y to Q or L in view of general knowledge and the disclosure provided herein. In some embodiments, Y is conjugated to L or Q through any position of Y. In some embodiments, Y is conjugated to L or Q through the carboxylic acid or alcohol moieties, as indicated below:

[chemical structure]

[0230] In some embodiments, Y acts at a retinoic acid receptor (e.g. RARα, RARβ, RARγ). In some embodiments, Y comprises any structure that permits or promotes agonist activity at the RAR, while in other embodiments Y is an antagonist of RAR. In exemplary embodiments, Y comprises a structure of Formula G:

[chemical structure]

wherein R¹¹ is a moiety that permits or promotes agonist or antagonist activity upon the binding of the compound of Formula G to a RAR, and [symbol] represents either E or Z stereochemistry.

[0231] In some embodiments, Y comprises a structure of Formula G wherein R¹¹ is C(O)OH, CH₂OH, or C(O)H. In some embodiments, Y comprises a structure of Formula G wherein R¹¹ is a carboxylic acid derivative (e.g. acyl chloride, anhydride, and ester).

[0232] Nonlimiting examples of the compound of Formula G include:

[chemical structure]

and derivatives thereof.

[0233] In embodiments wherein Y comprises a structure of Formula G, Y is conjugated to L (e.g. when L is a linking group) or Q (e.g. when L is a bond) at any position of Formula G that is capable of reacting with Q or L. One skilled in the art could readily determine the position of conjugation on Y and means of conjugation of Y to Q or L in view of general knowledge and the disclosure provided herein. In some embodiments, Y is conjugated to L or Q through any position of Y. In some embodiments, Formula G is conjugated to L or Q at R¹¹.

[0234] In some embodiments, Y acts at a peroxisome proliferator activated receptor (e.g. PPARα, PPARβ/δ, PPARγ). In some embodiments, Y comprises any structure that permits or promotes agonist activity at the PPAR, while in other embodiments Y is an antagonist of PPAR. In some embodiments, Y is a saturated or unsaturated, halogenated or nonhalogenated free fatty acid (FFA) as described by Formula H:

[chemical structure]

wherein n is 0-26 and each R¹², when present, is independently a moiety that permits or promotes agonist or antagonist activity upon binding of the compound of Formula H to a PPAR.

[0235] In some embodiments, Y comprises a structure of Formula H, wherein n is 0-26 and each R¹², when present, is independently hydrogen, C₁-C₇ alkyl, or halogen. In some embodiments Formula B is saturated such as, for example, formic acid, acetic acid, n-caproic acid, heptanoic acid, caprylic acid, nonanoic acid, capric acid, undecanoic acid, lauric acid, tridecanoic acid, myristic acid, pentadeconoic acid, palmitic acid, heptadecanoic acid, stearic acid, nonadecanoic acid, arachidic acid, heneicosanoic acid, behenic acid, tricosanoic acid, perfluorononanoic acid (see below), perfluorooctanoic acid (see below), and derivatives thereof. In some embodiments Formula His unsaturated with either cis or trans stereochemistry such as, for example, mead acid, myristoleic acid, palmitoleic acid, sapienic acid, oleic acid, linoleic acid, α-linolenic acid, elaidic acid, petroselinic acid, arachidonic acid, dihydroxyeicosatetraenoic acid (DiHETE), octadecynoic acid, eicosatriynoic acid, eicosadienoic acid, eicosatrienoic acid, eicosapentaenoic acid, erucic acid, dihomolinolenic acid, docosatrienoic acid, docosapentaenoic acid, docosahexaenoic acid, adrenic acid, and derivatives thereof.

[chemical structure]

[0236] In embodiments wherein Y comprises a structure of Formula H, Y is conjugated to L (e.g. when L is a linking group) or Q (e.g. when L is a bond) at any position of Formula H that is capable of reacting with Q or L. One skilled in the art could readily determine the position of conjugation on Formula H and means of conjugation of Formula H to Q or L in view of general knowledge and the disclosure provided herein. In some embodiments, Formula His conjugated to L or Q at any position on Formula H. In some embodiments, Formula His conjugated to L or Q through the terminal carboxylic acid moiety.

[0237] In some of these embodiments, Y is an eiconsanoid. In specific embodiments, Y is a prostaglandin or a leukotriene. In some exemplary embodiments, Y is a prostaglandin having a structure as described by Formulae J1-J6:

[chemical structure]

wherein each R¹³ is independently a moiety that permits or promotes agonist or antagonist activity upon the binding of the compound of Formula J to a PPAR (e.g. PGJ2 as shown below):

[chemical structure]

[0238] In some embodiments when Y comprises a structure of any one of Formulae J1-J6, each R¹³ is independently C₇-C₈ alkyl, C₇-C₈ alkenyl, C₇-C₈ alkynyl, or heteroalkyl.

[0239] In embodiments wherein Y is an eicosanoid, Y is conjugated to L (e.g. when L is a linking group) or Q (e.g. when L is a bond) at any position of the eicosanoid that is capable of reacting with Q or L. One skilled in the art could readily determine the position of conjugation on Y and means of conjugation of Y to Q or L in view of general knowledge and the disclosure provided herein. In some embodiments, Y is conjugated to L or Q through any position of Y. In some embodiments, the eicosanoid is conjugated to L or Q through a terminal carboxylic acid moiety or through a pendant alcohol moiety.

[0240] In some exemplary embodiments, Y is a leukotriene having a structure as described by Formula K or a derivatized form of Formula K:

[chemical structure]

wherein each R¹⁴ is independently a moiety that permits or promotes agonist or antagonist activity upon the binding of the compound of Formula K to a PPAR (e.g. leukotriene B4 as shown below):

[chemical structure]

[0241] In some embodiments when Y comprises a structure of Formula K, each R¹⁴ is independently C₃-C₁₃ alkyl, C₃-C₁₃ alkenyl, C₃-C₁₃ alkynyl, or heteroalkyl.

[0242] In embodiments wherein Y comprises a structure of Formula K, Y is conjugated to L (e.g. when L is a linking group) or Q (e.g. when L is a bond) at any position of Formula K that is capable of reacting with Q or L. One skilled in the art could readily determine the position of conjugation on Formula K and means of conjugation of Formula K to Q or L in view of general knowledge and the disclosure provided herein. In some embodiments, Formula K is conjugated to L or Q at any position on Formula K. In some embodiments, Formula K is conjugated to L or Q through the terminal carboxylic acid moiety or through a pendant alcohol moiety.

[0243] In some exemplary embodiments, Y is a thiazolidinedione comprising a structure as described by Formula L:

[chemical structure]

Nonlimiting examples of the compound of Formula L include:

[chemical structure]

and derivatives thereof.

[0244] In embodiments wherein Y comprises a structure of Formula L, Y is conjugated to L (e.g. when L is a linking group) or Q (e.g. when L is a bond) at any position of Formula L that is capable of reacting with Q or L. One skilled in the art could readily determine the position of conjugation on Formula L and means of conjugation of Formula L to Q or L in view of general knowledge and the disclosure provided herein. In some embodiments, Formula L is conjugated to L or Q at any position on Formula L, such as, for example, a pendant alcohol moiety, or through an aromatic substituent.

[0245] In some embodiments, Y acts at a RAR-related orphan receptor (e.g. RORα, RORβ, RORγ). In some embodiments, Y comprises any structure that permits or promotes agonist activity at the ROR, while in other embodiments Y is an antagonist of ROR.

[0246] Nonlimiting examples of Y include:

[chemical structure]

and derivatives thereof.

[0247] In embodiments wherein Y acts at a ROR, Y is conjugated to L (e.g. when L is a linking group) or Q (e.g. when L is a bond) at any position of Y that is capable of reacting with Q or L. One skilled in the art could readily determine the position of conjugation on Y and means of conjugation of Y to Q or L in view of general knowledge and the disclosure provided herein. In some embodiments, Y is conjugated to L or Q through any position of Y, such as, for example, any of the positions previously described herein.

[0248] In some embodiments, Y acts at a liver X receptor (LXRα, LXRβ). In some embodiments, Y comprises any structure that permits or promotes agonist activity at the LXR, while in other embodiments Y is an antagonist of LXR. In exemplary embodiments, Y is an oxysterol (i.e. oxygenated derivative of cholesterol). Nonlimiting examples of Y in these embodiments include 22(R)-hydroxycholesterol (see below), 24(S)-hydroxycholesterol (see below), 27-hydroxycholesterol, cholestenoic acid, and derivatives thereof.

[chemical structure]

[0249] In embodiments wherein Y acts at a LXR, Y is conjugated to L (e.g. when L is a linking group) or Q (e.g. when L is a bond) at any position of Y that is capable of reacting with Q or L. One skilled in the art could readily determine the position of conjugation on Y and means of conjugation of Y to Q or L in view of general knowledge and the disclosure provided herein. In some embodiments, Y is conjugated to L or Q at any of positions 1, 2, 3, 4, 5, 6, 7, 8, 9, 10, 11, 12, 13, 14, 15, 16, 17, 18, 19, 20, 21, 22, 23, 24, 25, or 26 of Formula F. In some embodiments, Formula F is conjugated to L or Q at position 3 or 17 of Formula F.

[0250] In some embodiments, Y acts at the farnesoid X receptor (FXR). In some embodiments, Y comprises any structure that permits or promotes agonist activity at the FXR, while in other embodiments Y is an antagonist of FXR. In some of these embodiments, Y is a bile acid. In exemplary embodiments, Y has a structure of Formula M:

[chemical structure]

wherein each of R¹⁵, R¹⁶, and R¹⁷ are independently moieties that permit or promote agonist or antagonist activity upon binding of the compound of Formula M to a FXR.

[0251] In some embodiments when Y comprises a structure of Formula M, each of R¹⁵ and R¹⁶ are independently hydrogen, (C₀-C₈ alkyl)halo, C₁-C₁₈ alkyl, C₂-C₁₈ alkenyl, C₂-C₁₈ alkynyl, heteroalkyl, or (C₀-C₈ alkyl)OH; and R¹⁷ is OH, (C₀-C₈ alkyl)NH(C₁-C₄ alkyl)SO₃H, or (C₀-C₈ alkyl)NH(C₁-C₄ alkyl)COOH.

[0252] In some embodiments when Y comprises a structure of Formula M, each of R¹⁵ and R¹⁶ are independently hydrogen or OH; and R¹⁷ is OH, NH(C₁-C₂ alkyl)SO₃H, or NH(C₁-C₂ alkyl)COOH.

[0253] Nonlimiting examples of the compound of Formula M include:

[chemical structure]

[chemical structure]

and derivatives thereof.

[0254] In embodiments wherein Y comprises a structure of Formula M, Y is conjugated to L (e.g. when L is a linking group) or Q (e.g. when L is a bond) at any position of Formula M that is capable of reacting with Q or L. One skilled in the art could readily determine the position of conjugation on Formula M and means of conjugation of Formula M to Q or L in view of general knowledge and the disclosure provided herein. In some embodiments, Formula M is conjugated to L or Q at any of positions 1, 2, 3, 4, 5, 6, 7, 8, 9, 10, 11, 12, 13, 14, 15, 16, 17, 18, 19, 20, 21, 22, 23, 24, or 25 of Formula M. In some embodiments, Formula M is conjugated to L or Q at position 3, 7, 12 or 17 of Formula M.

[0255] In some embodiments, Y acts at the vitamin D receptor (VDR). In some embodiments, Y comprises any structure that permits or promotes agonist activity at the VDR, while in other embodiments Y is an antagonist of VDR. In exemplary embodiments, Y has a structure of Formula N:

[chemical structure]

wherein each of R¹⁸, R¹⁹, R²⁰, R²¹, R²², and R²³ are moieties that permit or promote agonist or antagonist activity upon binding of the compound of Formula N to the VDR such as, for example, any of the vitamin D compounds found in Bouillon et al., Endocrine Reviews, 16(2):200-257 (1995).

[0256] In some embodiments wherein Y comprises a structure of Formula N,

[0257] R¹⁸ and R¹⁹ are each independently hydrogen, (C₀-C₈ alkyl)halo, (C₀-C₈ alkyl)heteroaryl, or (C₀-C₈ alkyl)OH;

[0258] both of R²⁰ are hydrogen or both of R²⁰ are taken together to form ═CH₂;

[0259] each of R²¹ and R²² are independently C₁-C₄ alkyl; and

[0260] R²³ is C₄-C₁₈ alkyl, C₄-C₁₈ alkenyl, C₄-C₁₈ alkynyl, heteroalkyl, (C₄-C₁₈ alkyl)aryl, (C₄-C₁₈ alkyl)heteroaryl, (C₀-C₈ alkyl)OC₁-C₁₈ alkyl, (C₀-C₈ alkenyl)OC₁-C₁₈ alkyl, (C₀-C₈ alkynyl)OC₁-C₁₈ alkyl, (C₀-C₈ alkyl)OC₂-C₁₈ alkenyl, (C₀-C₈ alkyl)OC₂-C₁₈ alkynyl, (C₆-C₁₈ alkyl)OH, (C₆-C₁₈ alkyl)SH, (C₆-C₁₈ alkenyl)OH, (C₆-C₁₈ alkynyl)OH, (C₀-C₈ alkyl)NR²⁴C₁-C₁₈ alkyl, (C₀-C₈ alkenyl)NR²⁴C₁-C₁₈ alkyl, (C₀-C₈ alkynyl)NR²⁴C₁-C₁₈ alkyl, (C₀-C₈ alkyl)NR²⁴C₂-C₁₈ alkenyl, (C₀-C₈ alkyl)NR²⁴C₂-C₁₈ alkynyl, (C₀-C₈ alkyl)C(O)C₁-C₁₈ alkyl, (C₀-C₈ alkyl)C(O)C₂-C₁₈ alkenyl, (C₀-C₈ alkyl)C(O)C₂-C₁₈ alkynyl, (C₀-C₈ alkyl)C(O)H, (C₀-C₈ alkyl)C(O)aryl, (C₀-C₈ alkyl)C(O)heteroaryl, (C₀-C₈ alkyl)C(O)OC₁-C₁₈ alkyl, (C₀-C₈ alkyl)C(O)OC₂-C₁₈ alkenyl, (C₀-C₈ alkyl)C(O)OC₂-C₁₈ alkynyl, (C₀-C₈ alkyl)C(O)OH, (C₀-C₈ alkyl)C(O)O aryl, (C₀-C₈ alkyl)C(O)O heteroaryl, (C₀-C₈ alkyl)OC(O)C₁-C₁₈ alkyl, (C₀-C₈ alkyl)OC(O)C₂-C₁₈ alkenyl, (C₀-C₈ alkyl)OC(O)C₂-C₁₈ alkynyl, (C₀-C₈ alkyl)C(O)NR²⁴C₁-C₁₈ alkyl, (C₀-C₈ alkyl)C(O)NR²⁴C₂-C₁₈ alkenyl, (C₀-C₈ alkyl)C(O)NR²⁴C₂-C₁₈ alkynyl, (C₀-C₈ alkyl)C(O)NR²⁴H₂, (C₀-C₈ alkyl)C(O)NR²⁴aryl, (C₀-C₈ alkyl)C(O)NR²⁴heteroaryl, (C₀-C₈ alkyl)NR²⁴C(O)C₁-C₁₈ alkyl, (C₀-C₈ alkyl)NR²⁴C(O)C₂-C₈ alkenyl, or (C₀-C₈ alkyl)NR²⁴C(O)C₂-C₁₈ alkynyl, (C₀-C₈ alkyl)NR²⁴C(O)OH, (C₀-C₈ alkyl)OC(O)OC₁-C₁₈ alkyl, (C₀-C₈ alkyl)OC(O)OC₂-C₁₈ alkenyl, (C₀-C₈ alkyl)OC(O)OC₂-C₁₈ alkynyl, (C₀-C₈ alkyl)OC(O)OH, (C₀-C₈ alkyl)OC(O)NR²⁴C₁-C₁₈ alkyl, (C₀-C₈ alkyl)OC(O)NR²⁴C₂-C₁₈ alkenyl, (C₀-C₈ alkyl)OC(O)NR²⁴C₂-C₁₈ alkynyl, (C₀-C₈ alkyl)OC(O)NR²⁴H₂, (C₀-C₈ alkyl)NR²⁴(O)OC₁-C₁₈ alkyl, (C₀-C₈ alkyl)NR²⁴(O)OC₂-C₁₈ alkenyl, (C₀-C₈ alkyl)NR²⁴(O)OC₂-C₁₈ alkynyl, or (C₀-C₈ alkyl)NR²⁴(O)OH; and

[0261] R²⁴ is hydrogen or C₁-C₁₈ alkyl.

[0262] Nonlimiting examples of the compound of Formula N include:

[chemical structure]

and derivatives thereof.

[0263] In embodiments wherein Y comprises a structure of Formula N, Y is conjugated to L (e.g. when L is a linking group) or Q (e.g. when L is a bond) at any position of Formula N that is capable of reacting with Q or L. One skilled in the art could readily determine the position of conjugation on Formula N and means of conjugation of Formula N to Q or L in view of general knowledge and the disclosure provided herein. In some embodiments, Formula N is conjugated to L or Q at any of positions 1, 2, 3, 4, 5, 6, 7, 8, 9, 10, 11, 12, 13, 14, 15, 16, 17, 18, 19, 20, 21, 22, 23, 24, 25, or 26 of Formula N. In some embodiments, Formula N is conjugated to L or Q at position 1, 3, 19, or 25 of Formula N.

[0264] In some embodiments, Y acts at the pregnane X receptor (PXR). In some embodiments, Y comprises any structure that permits or promotes agonist activity at the PXR, while in other embodiments Y is an antagonist of PXR. In some embodiments, Y is a steroid, antibiotic, antimycotic, bile acid, hyperforin, or a herbal compound. In exemplary embodiments, Y is compound that is able to induce CYP3A4, such as dexamethasone and rifampicin. In embodiments wherein Y comprises a structure that acts at the PXR, Y is conjugated to L (e.g. when L is a linking group) or Q (e.g. when L is a bond) at any position of Y that is capable of reacting with Q or L. One skilled in the art could readily determine the position of conjugation on Y and means of conjugation of Y to Q or L in view of general knowledge and the disclosure provided herein. In some embodiments, Y is conjugated to L or Q at any of positions on Y.

### Modification of the NHR Ligand (Y)

[0265] In some embodiments, the NHR ligand is derivatized or otherwise chemically modified to comprise a reactive moiety that is capable of reacting with the glucagon superfamily peptide (Q) or the linking group (L). In the embodiments described herein, Y is derivatized at any position of Y that is capable of reacting with Q or L. The position of derivatization on Y is apparent to one skilled in the art and depends on the type of NHR ligand used and the activity that is desired. For example, in embodiments wherein Y has a structure comprising a tetracyclic skeleton having three 6-membered rings joined to one 5-membered ring or a variation thereof, Y can be derivatized at any of positions 1, 2, 3, 4, 5, 6, 7, 8, 9, 10, 11, 12, 13, 14, 15, 16, 17, 18, 19, 20, 21, 22, 23, 24, or 25. Other positions of derivatization can be as previously described herein.

[0266] The NHR ligand can be derivatized using any agent known to one skilled in the art or described herein (e.g. see The Linking Group section and the Chemical Modification of Q and/or Y subsection). For example, estradiol can be derivatized with succinic acid, succinic anhydride, benzoic acid, ethyl 2-bromoacetate, or iodoacetic acid to form the below derivatives of estradiol that are capable of conjugating to Q or L.

[chemical structure]

[0267] Similarly, any of the aforementioned NHR ligands can be derivatized by methods known in the art. Additionally, certain derivatized ligands are commercially available and can be purchased from chemical companies such as Sigma-Aldrich.

### The Glucagon Superfamily Peptide (Q)

[0268] In the Q-L-Y conjugates described herein, Q is a glucagon superfamily peptide. A glucagon superfamily peptide refers to a group of peptides related in structure in their N-terminal and/or C-terminal regions (see, for example, Sherwood et al., Endocrine Reviews 21: 619-670 (2000)). It is believed that the C-terminus generally functions in receptor binding and the N-terminus generally functions in receptor signaling. A few amino acids in the N-terminal and C-terminal regions are highly conserved among members of the glucagon superfamily. Some of these conserved amino acids include His1, Gly4, Phe6, Phe22, Val23, Trp25 and Leu26, with amino acids at these positions showing identity, conservative substitutions or similarity in the structure of their amino acid side chains.

[0269] Glucagon superfamily peptides include glucagon related peptides, Growth Hormone Releasing Hormone (GHRH; SEQ ID NO: 1619), vasoactive intestinal peptide (VIP; SEQ ID NO: 1620), pituitary adenylate cyclase-activating polypeptide 27 (PACAP-27; SEQ ID NO: 1621), peptide histidine isoleucine (PHI; SEQ ID NO: 1542), peptide histidine methionine (PHM; SEQ ID NO: 1622), secretin (SEQ ID NO: 1623), and/or analogs, derivatives or conjugates thereof. In some embodiments, Q comprises an amino acid sequence of native glucagon, native exendin-4, native GLP-1 (7-37), native GLP-2, native GHRH, native VIP, native PACAP-27, native PHM, native oxyntomodulin, native secretin, or native GIP with up to 1, 2, 3, 4, 5, 6, 7, 8, 9 or 10 amino acid modifications.

[0270] In some aspects of this invention, Q is a glucagon related peptide such as, for example, glucagon (SEQ ID NO: 1601), oxyntomodulin (SEQ ID NO: 1606), exendin-4 (SEQ ID NO: 1618), glucagon-like peptide-1 (GLP-1) (amino acids 7-36 provided as SEQ ID NO: 1603; amino acids 7-37 are provided as SEQ ID NO: 1604), glucagon-like peptide-2 (GLP-2, SEQ ID NO: 1608), gastric inhibitory peptide (GIP, SEQ ID NO: 1607) or analogs, derivatives and conjugates thereof. A glucagon related peptide has biological activity (as an agonist or antagonist) at any one or more of the glucagon, GLP-1, GLP-2, and GIP receptors and comprise an amino acid sequence that shares at least 20% sequence identity (e.g., 25%, 30%, 35%, 40%, 45%, 50%, 55%, 60%, 65%, 70%, 75%, 80%, 85%, 90%, 95%) with at least one of native glucagon, native oxyntomodulin, native exendin-4, native GLP-1 (7-37), native GLP-2, or native GIP over the length of the peptide (or over the positions which correspond to glucagon, see e.g. FIG. 1).

[0271] It is understood that all possible activity subsets of glucagon related peptides are contemplated, e.g. peptides which have biological activity (as agonists or antagonists) at any one or more of the glucagon or GLP-1 or GIP receptors, together with all possible subsets of sequence identity to each listed native peptide, e.g., comprise an amino acid sequence that shares at least 20%, 25%, 30%, 35%, 40%, 45%, 50%, 55%, 60%, 65%, 70%, 75%, 80%, 85%, 90%, or 95% sequence identity with native GLP-1 over the length of native GLP-1. In some embodiments of the invention, the glucagon related peptide is a peptide having glucagon receptor agonist activity, GLP-1 receptor agonist activity, GIP receptor agonist activity, glucagon receptor/GLP-1 receptor co-agonist activity, glucagon receptor/GIP receptor co-agonist activity, GLP-1 receptor/GIP receptor co-agonist activity, glucagon receptor/GLP-1 receptor/GIP receptor tri-agonist activity, glucagon receptor antagonist activity, or glucagon receptor antagonist/GLP-1 receptor agonist activity. In some embodiments, the peptide retains an alpha-helix conformation in the C-terminal half of the molecule. In some embodiments, the peptide retains positions involved in receptor interaction or signaling, e.g. position 3 of glucagon, or position 7, 10, 12, 13, 15 or 17 of GLP-1 (7-37). Accordingly, the glucagon related peptide can be a peptide of Class 1, Class 2, Class 3, Class 4, and/or Class 5, each of which is further described herein.

[0272] Q may also be any of the glucagon superfamily peptides that are known in the art, some of which are disclosed herein by way of nonlimiting examples. A variety of GLP-1 analogs are known in the art and are a glucagon-related peptide according to the current invention, see, e.g., WO 2008023050, WO 2007030519, WO 2005058954, WO 2003011892, WO 2007046834, WO 2006134340, WO 2006124529, WO 2004022004, WO 2003018516, WO 2007124461 each incorporated herein by reference in its entirety for each of its sequence or formula disclosures of GLP-1 analogs or derivatives. In any of the embodiments, Q can be a glucagon related peptide disclosed in WO 2007/056362, WO 2008/086086, WO 2009/155527, WO 2008/101017, WO 2009/155258, WO 2009/058662, WO 2009/058734, WO 2009/099763, WO 2010/011439, PCT Patent Application No. U.S. 09/68,745, and U.S. Patent Application No. 61/187,578 each incorporated herein by reference in its entirety. In certain embodiments, Q is a Class 1, Class 2, Class 3, Class 4, or Class 5 glucagon related peptide as detailed herein. In any of the embodiments described herein, Q is any of SEQ ID NOs: 1-760, 801-919, 1001-1275, 1301-1371, 1401-1518, 1601-1650. In some embodiments, Q is any of SEQ ID NOs: 1647-1650.

### Activity of the Glucagon Superfamily Peptide (Q)

### Activity at the Glucagon Receptor

[0273] In some embodiments, Q exhibits an EC₅₀ for glucagon receptor activation (or an IC₅₀ for glucagon receptor antagonism) of about 10 mM or less, or about 1 mM (1000 μM) or less (e.g., about 750 μM or less, about 500 μM or less, about 250 μM or less, about 100 μM or less, about 75 μM or less, about 50 μM or less, about 25 μM or less, about 10 μM or less, about 7.5 μM or less, about 6 μM or less, about 5 μM or less, about 4 μM or less, about 3 μM or less, about 2 μM or less or about 1 μM or less). In some embodiments, Q exhibits an EC₅₀ or IC₅₀ at the glucagon receptor of about 1000 nM or less (e.g., about 750 nM or less, about 500 nM or less, about 250 nM or less, about 100 nM or less, about 75 nM or less, about 50 nM or less, about 25 nM or less, about 10 nM or less, about 7.5 nM or less, about 6 nM or less, about 5 nM or less, about 4 nM or less, about 3 nM or less, about 2 nM or less or about 1 nM or less). In some embodiments, Q has an EC₅₀ or IC₅₀ at the glucagon receptor which is in the picomolar range. Accordingly, in some embodiments, Q exhibits an EC₅₀ or IC₅₀ at the glucagon receptor of about 1000 pM or less (e.g., about 750 pM or less, about 500 pM or less, about 250 pM or less, about 100 pM or less, about 75 pM or less, about 50 pM or less, about 25 pM or less, about 10 pM or less, about 7.5 pM or less, about 6 pM or less, about 5 pM or less, about 4 pM or less, about 3 pM or less, about 2 pM or less or about 1 pM or less).

[0274] In some embodiments, Q exhibits an EC₅₀ or IC₅₀ at the glucagon receptor that is about 0.001 pM or more, about 0.01 pM or more, or about 0.1 pM or more. Glucagon receptor activation (glucagon receptor activity) can be measured by in vitro assays measuring cAMP induction in HEK293 cells over-expressing the glucagon receptor, e.g., assaying HEK293 cells co-transfected with DNA encoding the glucagon receptor and a luciferase gene linked to cAMP responsive element as described in Example 2.

[0275] In some embodiments, Q exhibits about 0.001% or more, about 0.01% or more, about 0.1% or more, about 0.5% or more, about 1% or more, about 5% or more, about 10% or more, about 20% or more, about 30% or more, about 40% or more, about 50% or more, about 60% or more, about 75% or more, about 100% or more, about 125% or more, about 150% or more, about 175% or more, about 200% or more, about 250% or more, about 300% or more, about 350% or more, about 400% or more, about 450% or more, or about 500% or higher activity at the glucagon receptor relative to native glucagon (glucagon potency). In some embodiments, Q exhibits about 5000% or less or about 10,000% or less activity at the glucagon receptor relative to native glucagon. The activity of Q at a receptor relative to a native ligand of the receptor is calculated as the inverse ratio of EC₅₀s for Q versus the native ligand.

[0276] In some embodiments, Q exhibits substantial activity (potency) at only the glucagon receptor and little to no activity at the GLP-1 receptor or the GIP receptor. In some embodiments, Q is considered as a “pure glucagon receptor agonist” or is not considered as a “glucagon/GLP-1 receptor co-agonist” or a “glucagon/GIP receptor co-agonist.” In some embodiments Q exhibits any of the levels of activity or potency at the glucagon receptor described herein but has substantially less activity (potency) at the GLP-1 receptor or the GIP receptor. In some embodiments, Q exhibits an EC₅₀ at the GLP-1 receptor which is 100-fold or greater than the EC₅₀ at the glucagon receptor. In some embodiments, Q exhibits an EC₅₀ at the GIP receptor which is 100-fold or greater than the EC₅₀ at the glucagon receptor.

### Activity at the GLP-1 Receptor

[0277] In some embodiments, Q exhibits an EC₅₀ for GLP-1 receptor activation (or an IC₅₀ for GLP-1 receptor antagonism) of about 10 mM or less, or about 1 mM (1000 μM) or less (e.g., about 750 μM or less, about 500 μM or less, about 250 μM or less, about 100 μM or less, about 75 μM or less, about 50 μM or less, about 25 μM or less, about 10 μM or less, about 7.5 μM or less, about 6 μM or less, about 5 μM or less, about 4 μM or less, about 3 μM or less, about 2 μM or less or about 1 μM or less). In some embodiments, Q exhibits an EC₅₀ or IC₅₀ for GLP-1 receptor activation of about 1000 nM or less (e.g., about 750 nM or less, about 500 nM or less, about 250 nM or less, about 100 nM or less, about 75 nM or less, about 50 nM or less, about 25 nM or less, about 10 nM or less, about 7.5 nM or less, about 6 nM or less, about 5 nM or less, about 4 nM or less, about 3 nM or less, about 2 nM or less or about 1 nM or less). In some embodiments, Q has an EC₅₀ or IC₅₀ at the GLP-1 receptor which is in the picomolar range. Accordingly, in some embodiments, Q exhibits an EC₅₀ or IC₅₀ for GLP-1 receptor activation of about 1000 pM or less (e.g., about 750 pM or less, about 500 pM or less, about 250 pM or less, about 100 pM or less, about 75 pM or less, about 50 pM or less, about 25 pM or less, about 10 pM or less, about 7.5 pM or less, about 6 pM or less, about 5 pM or less, about 4 pM or less, about 3 pM or less, about 2 pM or less or about 1 pM or less).

[0278] In some embodiments, Q exhibits an EC₅₀ or IC₅₀ at the GLP-1 receptor that is about 0.001 pM or more, about 0.01 pM or more, or about 0.1 pM or more. GLP-1 receptor activation (GLP-1 receptor activity) can be measured by in vitro assays measuring cAMP induction in HEK293 cells over-expressing the GLP-1 receptor, e.g., assaying HEK293 cells co-transfected with DNA encoding the GLP-1 receptor and a luciferase gene linked to cAMP responsive element as described in Example 2.

[0279] In some embodiments, Q exhibits about 0.001% or more, about 0.01% or more, about 0.1% or more, about 0.5% or more, about 1% or more, about 5% or more, about 10% or more, about 20% or more, about 30% or more, about 40% or more, about 50% or more, about 60% or more, about 75% or more, about 100% or more, about 125% or more, about 150% or more, about 175% or more, about 200% or more, about 250% or more, about 300% or more, about 350% or more, about 400% or more, about 450% or more, or about 500% or higher activity at the GLP-1 receptor relative to native GLP-1 (GLP-1 potency). In some embodiments, Q exhibits about 5000% or less or about 10,000% or less activity at the GLP-1 receptor relative to native GLP-1 (GLP-1 potency).

[0280] In some embodiments, Q exhibit substantial activity (potency) at only the GLP-1 receptor and little to no activity at the glucagon receptor or the GIP receptor. In some embodiments, Q is considered as a “pure GLP-1 receptor agonist” or is not considered as a “glucagon/GLP-1 receptor co-agonist” or a “GLP-1/GIP co-agonist.” In some embodiments Q exhibits any of the levels of activity or potency at the GLP-1 receptor described herein but have substantially less activity (potency) at the glucagon receptor or the GIP receptor. In some embodiments, Q exhibits an EC₅₀ at the glucagon receptor which is 100-fold or greater than the EC₅₀ at the GLP-1 receptor. In some embodiments, Q exhibits an EC₅₀ at the GIP receptor which is 100-fold or greater than the EC₅₀ at the GLP-1 receptor.

### Activity at the GIP Receptor

[0281] In some embodiments, Q exhibits an EC₅₀ for GIP receptor activation (or an IC₅₀ for GIP receptor antagonism) of about 10 mM or less, or about 1 mM (1000 μM) or less (e.g., about 750 μM or less, about 500 μM or less, about 250 μM or less, about 100 μM or less, about 75 μM or less, about 50 μM or less, about 25 μM or less, about 10 μM or less, about 7.5 μM or less, about 6 μM or less, about 5 μM or less, about 4 μM or less, about 3 μM or less, about 2 μM or less or about 1 μM or less). In some embodiments, the EC₅₀ or IC₅₀ of Q at the GIP receptor is less than 1000 nM, less than 900 nM, less than 800 nM, less than 700 nM, less than 600 nM, less than 500 nM, less than 400 nM, less than 300 nM, or less than 200 nM. In some embodiments, the EC₅₀ or IC₅₀ of Q at the GIP receptor is about 100 nM or less, e.g., about 75 nM or less, about 50 nM or less, about 25 nM or less, about 10 nM or less, about 8 nM or less, about 6 nM or less, about 5 nM or less, about 4 nM or less, about 3 nM or less, about 2 nM or less, or about 1 nM or less. In some embodiments, the Q exhibits an EC₅₀ or IC₅₀ for GIP receptor activation which is in the picomolar range. In exemplary embodiments, the EC₅₀ or IC₅₀ of Q at the GIP receptor is less than 1000 pM, less than 900 pM, less than 800 pM, less than 700 pM, less than 600 pM, less than 500 pM, less than 400 pM, less than 300 pM, less than 200 pM. In some embodiments, the EC₅₀ or IC₅₀ of Q at the GIP receptor is about 100 pM or less, e.g., about 75 pM or less, about 50 pM or less, about 25 pM or less, about 10 pM or less, about 8 pM or less, about 6 pM or less, about 5 pM or less, about 4 pM or less, about 3 pM or less, about 2 pM or less, or about 1 pM or less. Receptor activation can be measured by in vitro assays measuring cAMP induction in HEK293 cells over-expressing the GIP receptor, e.g. assaying HEK293 cells co-transfected with DNA encoding the receptor and a luciferase gene linked to cAMP responsive element as described in Example 2.

[0282] In some embodiments of the present disclosures, Q exhibits at least or about 0.1% activity of native GIP at the GIP receptor. In exemplary embodiments, Q exhibits at least or about 0.2%, at least or about 0.3%, at least or about 0.4%, at least or about 0.5%, at least or about 0.6%, at least or about 0.7%, at least or about 0.8%, at least or about 0.9%, at least or about 1%, at least or about 5%, at least or about 10%, at least or about 20%, at least or about 30%, at least or about 40%, at least or about 50%, at least or about 60%, at least or about 70%, at least or about 75%, at least or about 80%, at least or about 90%, at least or about 95%, or at least or about 100% of the activity of native GIP at the GIP receptor.

[0283] In some embodiments of the present disclosures, Q exhibits activity at the GIP receptor which is greater than that of native GIP. In exemplary embodiments, Q exhibits at least or about 101%, at least or about 105%, at least or about 110%, at least or about 125%, at least or about 150%, at least or about 175% at least or about 200%, at least or about 300%, at least or about 400%, at least or about 500% or higher % of the activity of native GIP at the GIP receptor. In some embodiments, Q exhibits no more than 1000%, 10,000%, 100,000%, or 1,000,000% activity at the GIP receptor relative to native GIP. A peptide's activity at the GIP receptor relative to native GIP is calculated as the inverse ratio of EC50s for the GIP agonist peptide vs. native GIP.

[0284] In some embodiments, Q exhibits substantial activity (potency) at only the GIP receptor and little to no activity at the glucagon receptor or the GLP-1 receptor. In some embodiments, Q is considered as a “pure GIP receptor agonist” or is not considered as a “glucagon/GIP receptor co-agonist” or a “GLP-1/GIP co-agonist.” In some embodiments Q exhibits any of the levels of activity or potency at the GIP receptor described herein but has substantially less activity (potency) at the glucagon receptor or the GLP-1 receptor. In some embodiments, Q exhibits an EC₅₀ at the glucagon receptor which is 100-fold or greater than the EC₅₀ at the GIP receptor and an EC₅₀ at the GLP-1 receptor which is 100-fold or greater than the EC₅₀ at the GIP receptor.

### Activity at the GLP-1 Receptor and the Glucagon Receptor

[0285] In some embodiments, Q exhibits activity at both the GLP-1 receptor and glucagon receptor (“glucagon/GLP-1 receptor co-agonists”). In some embodiments, the activity (e.g., the EC₅₀ or the relative activity or potency) of Q at the glucagon receptor is within about 50-fold, about 40-fold, about 30-fold, about 20-fold, about 10-fold, or about 5 fold different (higher or lower) from its activity (e.g., the EC₅₀ or the relative activity or potency) at the GLP-1 receptor. In some embodiments, the glucagon potency of Q is within about 25-, about 20-, about 15-, about 10-, or about 5-fold different (higher or lower) from its GLP-1 potency.

[0286] In some embodiments, the ratio of the relative activity or the EC₅₀ or the potency of the Q at the glucagon receptor divided by the relative activity or the EC₅₀ or potency of Q at the GLP-1 receptor is less than, or is about, X, wherein X is selected from 100, 75, 60, 50, 40, 30, 20, 15, 10, or 5. In some embodiments, the ratio of the EC₅₀ or potency or relative activity of Q at the glucagon receptor divided by the EC₅₀ or potency or relative activity of Q at the GLP-1 receptor is about 1 less than 5 (e.g., about 4, about 3, about 2, about 1). In some embodiments, the ratio of the glucagon potency of Q compared to the GLP-1 potency of Q is less than, or is about, Z, wherein Z is selected from 100, 75, 60, 50, 40, 30, 20, 15, 10, and 5. In some embodiments, the ratio of the glucagon potency of Q compared to the GLP-1 potency of Q is less than 5 (e.g., about 4, about 3, about 2, about 1). In some embodiments, Q has an EC₅₀ at the glucagon receptor which is 2- to 10-fold (e.g., 2-fold, 3-fold, 4-fold, 5-fold, 6-fold, 7-fold, 8-fold, 9-fold, 10-fold) greater than the EC₅₀ at the GLP-1 receptor.

[0287] In some embodiments, the ratio of the relative activity or potency or the EC₅₀ of Q at the GLP-1 receptor divided by the relative activity or potency or the EC₅₀ of the glucagon analog at the glucagon receptor is less than, or is about, V, wherein V is selected from 100, 75, 60, 50, 40, 30, 20, 15, 10, or 5. In some embodiments, the ratio of the EC₅₀ or potency or relative activity of Q at the GLP-1 receptor divided by the EC₅₀ or potency or relative activity of Q at the glucagon receptor is less than 5 (e.g., about 4, about 3, about 2, about 1). In some embodiments, the ratio of the GLP-1 potency of Q compared to the glucagon potency of Q is less than, or is about, W, wherein W is selected from 100, 75, 60, 50, 40, 30, 20, 15, 10, and 5. In some embodiments, the ratio of the GLP-1 potency of Q compared to the glucagon potency of Q is less than 5 (e.g., about 4, about 3, about 2, about 1). In some embodiments, Q has an EC₅₀ at the GLP-1 receptor which is about 2- to about 10-fold (e.g., 2-fold, 3-fold, 4-fold, 5-fold, 6-fold, 7-fold, 8-fold, 9-fold, 10-fold) greater than the EC₅₀ at the glucagon receptor.

[0288] In some embodiments, Q exhibits at least 0.1% (e.g., about 0.5% or more, about 1% or more, about 5% or more, about 10% or more, or more) of the activity of native GLP-1 at the GLP-1 receptor (GLP-1 potency) and exhibits at least 0.1% (e.g., about 0.5% or more, about 1% or more, about 5% or more, about 10% or more, or more) of the activity of native glucagon at the glucagon receptor (glucagon potency).

[0289] Selectivity of Q for the glucagon receptor versus the GLP-1 receptor can be described as the relative ratio of glucagon/GLP-1 activity (Q's activity at the glucagon receptor relative to native glucagon, divided by the analog's activity at the GLP-1 receptor relative to native GLP-1). For example, a Q that exhibits 60% of the activity of native glucagon at the glucagon receptor and 60% of the activity of native GLP-1 at the GLP-1 receptor has a 1:1 ratio of glucagon/GLP-1 activity. Exemplary ratios of glucagon/GLP-1 activity include about 1:1, 1.5:1, 2:1, 3:1, 4:1, 5:1, 6:1, 7:1, 8:1, 9:1 or 10:1, or about 1:10, 1:9, 1:8, 1:7, 1:6, 1:5, 1:4, 1:3, 1:2, or 1:1.5. As an example, a glucagon/GLP-1 activity ratio of 10:1 indicates a 10-fold selectivity for the glucagon receptor versus the GLP-1 receptor. Similarly, a GLP-1/glucagon activity ratio of 10:1 indicates a 10-fold selectivity for the GLP-1 receptor versus the glucagon receptor.

[0290] In some embodiments, Q exhibits substantial activity (potency) at the glucagon receptor and GLP-1 receptor and little to no activity at the GIP receptor. In some embodiments Q exhibits any of the levels of activity or potency at the glucagon receptor and the GLP-1 receptor described herein but has substantially less activity (potency) at the GIP receptor. In some embodiments, Q exhibits an EC₅₀ at the GIP receptor which is 100-fold or greater than the EC₅₀ at the glucagon receptor and the EC₅₀ at the GLP-1 receptor.

### Activity at the GLP-1 Receptor and the GIP Receptor

[0291] In some embodiments, Q exhibits activity at both the GLP-1 receptor and GIP receptor (“GIP/GLP-1 receptor co-agonists”). In some embodiments, the activity (e.g., the EC₅₀ or the relative activity or potency) of Q at the GIP receptor is within about 50-fold, about 40-fold, about 30-fold, about 20-fold, about 10-fold, or about 5 fold different (higher or lower) from its activity (e.g., the EC₅₀ or the relative activity or potency) at the GLP-1 receptor. In some embodiments, the GIP potency of Q is within about 25-, about 20-, about 15-, about 10-, or about 5-fold different (higher or lower) from its GLP-1 potency.

[0292] In some embodiments, the ratio of the relative activity or the EC₅₀ or the potency of the Q at the GIP receptor divided by the relative activity or the EC₅₀ or potency of Q at the GLP-1 receptor is less than, or is about, X, wherein X is selected from 100, 75, 60, 50, 40, 30, 20, 15, 10, or 5. In some embodiments, the ratio of the EC₅₀ or potency or relative activity of Q at the GIP receptor divided by the EC₅₀ or potency or relative activity of Q at the GLP-1 receptor is about 1 less than 5 (e.g., about 4, about 3, about 2, about 1). In some embodiments, the ratio of the GIP potency of Q compared to the GLP-1 potency of Q is less than, or is about, Z, wherein Z is selected from 100, 75, 60, 50, 40, 30, 20, 15, 10, and 5. In some embodiments, the ratio of the GIP potency of Q compared to the GLP-1 potency of Q is less than 5 (e.g., about 4, about 3, about 2, about 1). In some embodiments, Q has an EC₅₀ at the GIP receptor which is 2- to 10-fold (e.g., 2-fold, 3-fold, 4-fold, 5-fold, 6-fold, 7-fold, 8-fold, 9-fold, 10-fold) greater than the EC₅₀ at the GLP-1 receptor.

[0293] In some embodiments, the ratio of the relative activity or potency or the EC₅₀ of Q at the GLP-1 receptor divided by the relative activity or potency or the EC₅₀ of Q at the GIP receptor is less than, or is about, V, wherein V is selected from 100, 75, 60, 50, 40, 30, 20, 15, 10, or 5. In some embodiments, the ratio of the EC₅₀ or potency or relative activity of Q at the GLP-1 receptor divided by the EC₅₀ or potency or relative activity of Q at the GIP receptor is less than 5 (e.g., about 4, about 3, about 2, about 1). In some embodiments, the ratio of the GLP-1 potency of Q compared to the GIP potency of Q is less than, or is about, W, wherein W is selected from 100, 75, 60, 50, 40, 30, 20, 15, 10, and 5. In some embodiments, the ratio of the GLP-1 potency of Q compared to the GIP potency of Q is less than 5 (e.g., about 4, about 3, about 2, about 1). In some embodiments, Q has an EC₅₀ at the GLP-1 receptor which is about 2- to about 10-fold (e.g., 2-fold, 3-fold, 4-fold, 5-fold, 6-fold, 7-fold, 8-fold, 9-fold, 10-fold) greater than the EC₅₀ at the GIP receptor.

[0294] In some embodiments, Q exhibits at least 0.1% (e.g., about 0.5% or more, about 1% or more, about 5% or more, about 10% or more, or more) of the activity of native GLP-1 at the GLP-1 receptor (GLP-1 potency) and exhibits at least 0.1% (e.g., about 0.5% or more, about 1% or more, about 5% or more, about 10% or more, or more) of the activity of native GIP at the GIP receptor (GIP potency).

[0295] Selectivity of Q for the GIP receptor versus the GLP-1 receptor can be described as the relative ratio of GIP/GLP-1 activity (Q's activity at the GIP receptor relative to native GIP, divided by the analog's activity at the GLP-1 receptor relative to native GLP-1). For example, a Q that exhibits 60% of the activity of native GIP at the GIP receptor and 60% of the activity of native GLP-1 at the GLP-1 receptor has a 1:1 ratio of GIP/GLP-1 activity. Exemplary ratios of GIP/GLP-1 activity include about 1:1, 1.5:1, 2:1, 3:1, 4:1, 5:1, 6:1, 7:1, 8:1, 9:1 or 10:1, or about 1:10, 1:9, 1:8, 1:7, 1:6, 1:5, 1:4, 1:3, 1:2, or 1:1.5. As an example, a GIP/GLP-1 activity ratio of 10:1 indicates a 10-fold selectivity for the GIP receptor versus the GLP-1 receptor. Similarly, a GLP-1/GIP activity ratio of 10:1 indicates a 10-fold selectivity for the GLP-1 receptor versus the GIP receptor.

### Activity at the Glucagon Receptor and the GIP Receptor

[0296] In some embodiments, Q exhibits activity at both the glucagon receptor and GIP receptor (“GIP/glucagon receptor co-agonists”). In some embodiments, the activity (e.g., the EC₅₀ or the relative activity or potency) of Q at the GIP receptor is within about 50-fold, about 40-fold, about 30-fold, about 20-fold, about 10-fold, or about 5 fold different (higher or lower) from its activity (e.g., the EC₅₀ or the relative activity or potency) at the glucagon receptor. In some embodiments, the GIP potency of Q is within about 25-, about 20-, about 15-, about 10-, or about 5-fold different (higher or lower) from its glucagon potency.

[0297] In some embodiments, the ratio of the relative activity or the EC₅₀ or the potency of the Q at the GIP receptor divided by the relative activity or the EC₅₀ or potency of Q at the glucagon receptor is less than, or is about, X, wherein X is selected from 100, 75, 60, 50, 40, 30, 20, 15, 10, or 5. In some embodiments, the ratio of the EC₅₀ or potency or relative activity of Q at the GIP receptor divided by the EC₅₀ or potency or relative activity of Q at the glucagon receptor is about 1 less than 5 (e.g., about 4, about 3, about 2, about 1). In some embodiments, the ratio of the GIP potency of Q compared to the glucagon potency of Q is less than, or is about, Z, wherein Z is selected from 100, 75, 60, 50, 40, 30, 20, 15, 10, and 5. In some embodiments, the ratio of the GIP potency of Q compared to the glucagon potency of Q is less than 5 (e.g., about 4, about 3, about 2, about 1). In some embodiments, Q has an EC₅₀ at the GIP receptor which is 2- to 10-fold (e.g., 2-fold, 3-fold, 4-fold, 5-fold, 6-fold, 7-fold, 8-fold, 9-fold, 10-fold) greater than the EC₅₀ at the glucagon receptor.

[0298] In some embodiments, the ratio of the relative activity or potency or the EC₅₀ of Q at the glucagon receptor divided by the relative activity or potency or the EC₅₀ of Q at the GIP receptor is less than, or is about, V, wherein V is selected from 100, 75, 60, 50, 40, 30, 20, 15, 10, or 5. In some embodiments, the ratio of the EC₅₀ or potency or relative activity of Q at the glucagon receptor divided by the EC₅₀ or potency or relative activity of Q at the GIP receptor is less than 5 (e.g., about 4, about 3, about 2, about 1). In some embodiments, the ratio of the glucagon potency of Q compared to the GIP potency of Q is less than, or is about, W, wherein W is selected from 100, 75, 60, 50, 40, 30, 20, 15, 10, and 5. In some embodiments, the ratio of the glucagon potency of Q compared to the GIP potency of Q is less than 5 (e.g., about 4, about 3, about 2, about 1). In some embodiments, Q has an EC₅₀ at the glucagon receptor which is about 2- to about 10-fold (e.g., 2-fold, 3-fold, 4-fold, 5-fold, 6-fold, 7-fold, 8-fold, 9-fold, 10-fold) greater than the EC₅₀ at the GIP receptor.

[0299] In some embodiments, Q exhibits at least 0.1% (e.g., about 0.5% or more, about 1% or more, about 5% or more, about 10% or more, or more) of the activity of native glucagon at the glucagon receptor (glucagon potency) and exhibits at least 0.1% (e.g., about 0.5% or more, about 1% or more, about 5% or more, about 10% or more, or more) of the activity of native GIP at the GIP receptor (GIP potency).

[0300] Selectivity of Q for the GIP receptor versus the glucagon receptor can be described as the relative ratio of GIP/glucagon activity (Q's activity at the GIP receptor relative to native GIP, divided by the analog's activity at the glucagon receptor relative to native glucagon). For example, a Q that exhibits 60% of the activity of native GIP at the GIP receptor and 60% of the activity of native glucagon at the glucagon receptor has a 1:1 ratio of GIP/glucagon activity. Exemplary ratios of GIP/glucagon activity include about 1:1, 1.5:1, 2:1, 3:1, 4:1, 5:1, 6:1, 7:1, 8:1, 9:1 or 10:1, or about 1:10, 1:9, 1:8, 1:7, 1:6, 1:5, 1:4, 1:3, 1:2, or 1:1.5. As an example, a GIP/glucagon activity ratio of 10:1 indicates a 10-fold selectivity for the GIP receptor versus the glucagon receptor. Similarly, a glucagon/GIP activity ratio of 10:1 indicates a 10-fold selectivity for the glucagon receptor versus the GIP receptor.

### Activity at the Glucagon Receptor, the GLP-1 Receptor, and the GIP Receptor

[0301] In some embodiments, Q exhibits activity at all three of the glucagon receptor, the GLP-1 receptor, and the GIP receptor (“glucagon/GLP-1/GIP receptor tri-agonists”). In some embodiments, the activity (e.g., the EC₅₀ or the relative activity or potency) of Q at the glucagon receptor is within about 100-fold, about 75-fold, about 60-fold, 50-fold, about 40-fold, about 30-fold, about 20-fold, about 10-fold, or about 5 fold different (higher or lower) from its activity (e.g., the EC₅₀ or the relative activity or potency) at both the GLP-1 receptor and the GIP receptor. In some embodiments, the activity (e.g., the EC₅₀ or the relative activity or potency) of Q at the GLP-1 receptor is within about 100-fold, about 75-fold, about 60-fold, 50-fold, about 40-fold, about 30-fold, about 20-fold, about 10-fold, or about 5 fold different (higher or lower) from its activity (e.g., the EC₅₀ or the relative activity or potency) at both the glucagon receptor and the GIP receptor. In some embodiments, the activity (e.g., the EC₅₀ or the relative activity or potency) of Q at the GIP receptor is within about 100-fold, about 75-fold, about 60-fold, 50-fold, about 40-fold, about 30-fold, about 20-fold, about 10-fold, or about 5 fold different (higher or lower) from its activity (e.g., the EC₅₀ or the relative activity or potency) at both the glucagon receptor and the GLP-1 receptor. This fold difference can be alternatively expressed as ratios of glucagon/GLP-1, or GLP-1/GIP, or glucagon/GLP-1 as above.

### Structure of the Glucagon Superfamily Peptide (Q)

[0302] The glucagon superfamily peptide (Q) described herein can comprise an amino acid sequence which is based on the amino acid sequence of native human glucagon (SEQ ID NO: 1601), native human GLP-1 (SEQ ID NOs: 1603 or 1604), or native human GIP (SEQ ID NO: 1607).

### Based on Native Human Glucagon

[0303] In some aspects of the invention, the glucagon superfamily peptide (Q) comprises an amino acid sequence that is based on the amino acid sequence of native human glucagon (SEQ ID NO: 1601). In some aspects, Q comprises a modified amino acid sequence of SEQ ID NO: 1601 comprising 1, 2, 3, 4, 5, 6, 7, 8, 9, 10, 11, 12, 13, 14, 15, and in some instances, 16 or more (e.g., 17, 18, 19, 20, 21, 22, 23, 24, 25, etc.), amino acid modifications. In some embodiments, Q comprises a total of 1, up to 2, up to 3, up to 4, up to 5, up to 6, up to 7, up to 8, up to 9, or up to 10 amino acid modifications relative to the native human glucagon sequence (SEQ ID NO: 1601). In some embodiments, the modifications are any of those described herein, e.g., acylation, alkylation, pegylation, truncation at C-terminus, substitution of the amino acid at one or more of positions 1, 2, 3, 7, 10, 12, 15, 16, 17, 18, 19, 20, 21, 23, 24, 27, 28, and 29.

[0304] In some embodiments, Q comprises an amino acid sequence which has at least 25% sequence identity to the amino acid sequence of native human glucagon (SEQ ID NO: 1601). In some embodiments, Q comprises an amino acid sequence which is at least 30%, at least 40%, at least 50%, at least 60%, at least 70%, at least 80%, at least 85%, at least 90% or has greater than 90% sequence identity to SEQ ID NO: 1601. In some embodiments, the amino acid sequence of Q, which has the above-referenced % sequence identity is the full-length amino acid sequence of Q. In some embodiments, the amino acid sequence of Q which has the above-referenced % sequence identity is only a portion of the amino acid sequence of Q. In some embodiments, Q comprises an amino acid sequence which has about A % or greater sequence identity to a reference amino acid sequence of at least 5 contiguous amino acids (e.g., at least 6, at least 7, at least 8, at least 9, at least 10 amino acids) of SEQ ID NO: 1601, wherein the reference amino acid sequence begins with the amino acid at position C of SEQ ID NO: 1601 and ends with the amino acid at position D of SEQ ID NO: 1601, wherein A is 25, 30, 35, 40, 45, 50, 55, 60, 65, 70, 75, 80, 85, 90, 91, 92, 93, 94, 95, 96, 97, 98, 99; C is 1, 2, 3, 4, 5, 6, 7, 8, 9, 10, 11, 12, 13, 14, 15, 16, 17, 18, 19, 20, 21, 22, 23, 24, 25, 26, 27, or 28 and D is 5, 6, 7, 8, 9, 10, 11, 12, 13, 14, 15, 16, 17, 18, 19, 20, 21, 22, 23, 24, 25, 26, 27, 28 or 29. Any and all possible combinations of the foregoing parameters are envisioned, including but not limited to, e.g., wherein A is 90% and C and D are 1 and 27, or 6 and 27, or 8 and 27, or 10 and 27, or 12 and 27, or 16 and 27.

### Based on Native Human GLP-1

[0305] In some aspects of the invention, the glucagon superfamily peptide (Q) comprises an amino acid sequence that is based on the amino acid sequence of native human GLP-1 (SEQ ID NO: 1603). In some aspects, Q comprises a modified amino acid sequence of SEQ ID NO: 1603 comprising 1, 2, 3, 4, 5, 6, 7, 8, 9, 10, 11, 12, 13, 14, 15, and in some instances, 16 or more (e.g., 17, 18, 19, 20, 21, 22, 23, 24, 25, etc.), amino acid modifications. In some embodiments, Q comprises a total of 1, up to 2, up to 3, up to 4, up to 5, up to 6, up to 7, up to 8, up to 9, or up to 10 amino acid modifications relative to the native human GLP-1 sequence (SEQ ID NO: 1603). In some embodiments, the modifications are any of those described herein, e.g., acylation, alkylation, pegylation, truncation at C-terminus, substitution of the amino acid at one or more of positions 1, 2, 3, 7, 10, 12, 15, 16, 17, 18, 19, 20, 21, 23, 24, 27, 28, and 29.

[0306] In some embodiments, Q comprises an amino acid sequence which has at least 25% sequence identity to the amino acid sequence of native human GLP-1 (SEQ ID NO: 1603). In some embodiments, Q comprises an amino acid sequence which is at least 30%, at least 40%, at least 50%, at least 60%, at least 70%, at least 80%, at least 85%, at least 90% or has greater than 90% sequence identity to SEQ ID NO: 1603. In some embodiments, the amino acid sequence of Q, which has the above-referenced % sequence identity is the full-length amino acid sequence of Q. In some embodiments, the amino acid sequence of Q which has the above-referenced % sequence identity is only a portion of the amino acid sequence of Q. In some embodiments, Q comprises an amino acid sequence which has about A % or greater sequence identity to a reference amino acid sequence of at least 5 contiguous amino acids (e.g., at least 6, at least 7, at least 8, at least 9, at least 10 amino acids) of SEQ ID NO: 1603, wherein the reference amino acid sequence begins with the amino acid at position C of SEQ ID NO: 1603 and ends with the amino acid at position D of SEQ ID NO: 1603, wherein A is 25, 30, 35, 40, 45, 50, 55, 60, 65, 70, 75, 80, 85, 90, 91, 92, 93, 94, 95, 96, 97, 98, 99; C is 1, 2, 3, 4, 5, 6, 7, 8, 9, 10, 11, 12, 13, 14, 15, 16, 17, 18, 19, 20, 21, 22, 23, 24, 25, 26, 27, or 28 and D is 5, 6, 7, 8, 9, 10, 11, 12, 13, 14, 15, 16, 17, 18, 19, 20, 21, 22, 23, 24, 25, 26, 27, 28 or 29. Any and all possible combinations of the foregoing parameters are envisioned, including but not limited to, e.g., wherein A is 90% and C and D are 1 and 27, or 6 and 27, or 8 and 27, or 10 and 27, or 12 and 27, or 16 and 27.

### Based on Native Human GIP

[0307] In some embodiments of the present disclosures, Q is an analog of native human GIP, the amino acid sequence of which is provided herein as SEQ ID NO: 1607. Accordingly, in some embodiments, Q comprises an amino acid sequence which is based on the amino acid sequence of SEQ ID NO: 1607 but is modified with 1, 2, 3, 4, 5, 6, 7, 8, 9, 10, 11, 12, 13, 14, 15, and in some instances, 16 or more (e.g., 17, 18, 19, 20, 21, 22, 23, 24, 25, etc.), amino acid modifications. In some embodiments, Q comprises a total of 1, up to 2, up to 3, up to 4, up to 5, up to 6, up to 7, up to 8, up to 9, or up to 10 amino acid modifications relative to the native human GIP sequence (SEQ ID NO: 1607). In some embodiments, the modifications are any of those described herein, e.g., acylation, alkylation, pegylation, truncation at C-terminus, substitution of the amino acid at one or more of positions 1, 2, 3, 7, 10, 12, 15, 16, 17, 18, 19, 20, 21, 23, 24, 27, 28, and 29. Exemplary GIP receptor agonists are known in the art. See, for example, Irwin et al., J Pharm and Expmt Ther 314(3): 1187-1194 (2005); Salhanick et al., Bioorg Med Chem Lett 15(18): 4114-4117 (2005); Green et al., Dibetes 7(5): 595-604 (2005); O'Harte et al., J Endocrinol 165(3): 639-648 (2000); O'Harte et al., Diabetologia 45(9): 1281-1291 (2002); Gault et al., Biochem J 367 (Pt3): 913-920 (2002); Gault et al., J Endocrin 176: 133-141 (2003); Irwin et al., Diabetes Obes Metab. 11(6): 603-610 (epub 2009).

[0308] In some embodiments, Q comprises an amino acid sequence which has at least 25% sequence identity to the amino acid sequence of native human GIP (SEQ ID NO: 1607). In some embodiments, Q comprises an amino acid sequence which is at least 30%, at least 40%, at least 50%, at least 60%, at least 70%, at least 80%, at least 85%, at least 90% or has greater than 90% sequence identity to SEQ ID NO: 1607. In some embodiments, the amino acid sequence of Q which has the above-referenced % sequence identity is the full-length amino acid sequence of Q. In some embodiments, the amino acid sequence of Q which has the above-referenced % sequence identity is only a portion of the amino acid sequence of Q. In some embodiments, Q comprises an amino acid sequence which has about A % or greater sequence identity to a reference amino acid sequence of at least 5 contiguous amino acids (e.g., at least 6, at least 7, at least 8, at least 9, at least 10 amino acids) of SEQ ID NO: 1607, wherein the reference amino acid sequence begins with the amino acid at position C of SEQ ID NO: 1607 and ends with the amino acid at position D of SEQ ID NO: 1607, wherein A is 25, 30, 35, 40, 45, 50, 55, 60, 65, 70, 75, 80, 85, 90, 91, 92, 93, 94, 95, 96, 97, 98, 99; C is 1, 2, 3, 4, 5, 6, 7, 8, 9, 10, 11, 12, 13, 14, 15, 16, 17, 18, 19, 20, 21, 22, 23, 24, 25, 26, 27, or 28 and D is 5, 6, 7, 8, 9, 10, 11, 12, 13, 14, 15, 16, 17, 18, 19, 20, 21, 22, 23, 24, 25, 26, 27, 28 or 29. Any and all possible combinations of the foregoing parameters are envisioned, including but not limited to, e.g., wherein A is 90% and C and D are 1 and 27, or 6 and 27, or 8 and 27, or 10 and 27, or 12 and 27, or 16 and 27.

### Modifications

[0309] Where Q is a glucagon related peptide, Q can comprise the native glucagon amino acid sequence (SEQ ID NO: 1601) with modifications. In exemplary embodiments, the glucagon related peptide may comprise a total of 1, up to 2, up to 3, up to 4, up to 5, up to 6, up to 7, up to 8, up to 9, or up to 10 amino acid modifications relative to the native glucagon sequence, e.g. conservative or non-conservative substitutions. Modifications and substitutions described herein are, in certain aspects made at specific positions within Q wherein the numbering of the position corresponds to the numbering of glucagon (SEQ ID NO: 1601). In some embodiments 1, 2, 3, 4 or 5 non-conservative substitutions are carried out at any of positions 2, 5, 7, 10, 11, 12, 13, 14, 17, 18, 19, 20, 21, 24, 27, 28 or 29 and up to 5 further conservative substitutions are carried out at any of these positions. In some embodiments 1, 2, or 3 amino acid modifications are carried out within amino acids at positions 1-16, and 1, 2 or 3 amino acid modifications are carried out within amino acids at positions 17-26. In some embodiments, Q retains at least 22, 23, 24, 25, 26, 27 or 28 of the naturally occurring amino acids at the corresponding positions in native glucagon (e.g. have 1-7, 1-5 or 1-3 modifications relative to naturally occurring glucagon).

### DPP-IV Resistance

[0310] In some embodiments, where Q is a glucagon superfamily peptide, Q comprises a modification at position 1 or 2 to reduce susceptibility to cleavage by dipeptidyl peptidase IV (DPP-IV). More particularly, in some embodiments, position 1 of Q (e.g., selected from those in FIG. 1) is substituted with an amino acid selected from the group consisting of D-histidine, alpha, alpha-dimethyl imidiazole acetic acid (DMIA), N-methyl histidine, alpha-methyl histidine, imidazole acetic acid, desaminohistidine, hydroxyl-histidine, acetyl-histidine and homo-histidine. More particularly, in some embodiments, position 2 of Q is substituted with an amino acid selected from the group consisting of D-serine, D-alanine, valine, glycine, N-methyl serine, and aminoisobutyric acid. In some embodiments, position 2 of the glucagon related peptide is not D-serine.

### Glucagon Modification at Position 3

[0311] Glucagon related peptides of Classes 1 to 3 described herein may be modified at position 3 (according to the amino acid numbering of wild type glucagon) to maintain or increase activity at the glucagon receptor.

[0312] In some embodiments in which Q is a Class 1, Class 2, or Class 3 glucagon related peptide, maintained or enhanced activity at the glucagon receptor may be achieved by modifying the Gln at position 3 with a glutamine analog. For example, a Class 1, Class 2, or Class 3 glucagon related peptide comprising a glutamine analog at position 3 may exhibit about 5%, about 10%, about 20%, about 50%, or about 85% or greater the activity of native glucagon (SEQ ID NO: 1601) at the glucagon receptor. In some embodiments a Class 1, Class 2, or Class 3 glucagon related peptide comprising a glutamine analog at position 3 may exhibit about 20%, about 50%, about 75%, about 100%, about 200% or about 500% or greater the activity of a corresponding glucagon peptide having the same amino acid sequence as the peptide comprising the glutamine analog, except for the modified amino acid at position 3 at the glucagon receptor. In some embodiments, a Class 1, Class 2, or Class 3 glucagon related peptide comprising a glutamine analog at position 3 exhibits enhanced activity at the glucagon receptor, but the enhanced activity is no more than 1000%, 10,000%, 100,000%, or 1,000,000% of the activity of native glucagon or of a corresponding glucagon related peptide having the same amino acid sequence as the peptide comprising the glutamine analog, except for the modified amino acid at position 3.

[0313] In some embodiments, the glutamine analog is a naturally occurring or a non-naturally occurring amino acid comprising a side chain of Structure I, II or III:

[chemical structure]

wherein R¹ is C₀₋₃ alkyl or C₀₋₃ heteroalkyl; R² is NHR⁴ or C₁₋₃ alkyl; R³ is C₁₋₃ alkyl; R⁴ is H or C₁₋₃ alkyl; X is NH, O, or S; and Y is NHR⁴, SR³, or OR³. In some embodiments, X is NH or Y is NHR⁴. In some embodiments, R¹ is C₀₋₂ alkyl or C₁ heteroalkyl. In some embodiments, R² is NHR⁴ or C₁ alkyl. In some embodiments, R⁴ is H or C¹ alkyl. In exemplary embodiments in which Q is a Class 1, Class 2, or Class 3 glucagon related peptide, an amino acid comprising a side chain of Structure I is provided where, R¹ is CH₂—S, X is NH, and R² is CH₃ (acetamidomethyl-cysteine, C(Acm)); R¹ is CH₂, X is NH, and R² is CH₃ (acetyldiaminobutanoic acid, Dab(Ac)); R¹ is C₀ alkyl, X is NH, R² is NHR⁴, and R⁴ is H (carbamoyldiaminopropanoic acid, Dap(urea)); or R¹ is CH₂—CH₂, X is NH, and R² is CH₃ (acetylornithine, Orn(Ac)). In exemplary embodiments an amino acid comprising a side chain of Structure II is provided where, R¹ is CH₂, Y is NHR⁴, and R⁴ is CH₃ (methylglutamine, Q(Me)); In exemplary embodiments an amino acid comprising a side chain of Structure 1111 is provided where, R¹ is CH₂ and R⁴ is H (methionine-sulfoxide, M(O)); In specific embodiments, the amino acid at position 3 is substituted with Dab(Ac).

### Acylation of Q

[0314] In some embodiments, the glucagon related peptide (e.g. a Class 1 glucagon related peptide, Class 2 glucagon related peptide, Class 3 glucagon related peptide, Class 4 glucagon related peptide, Class 4 glucagon related peptides or Class 5 glucagon related peptide), Q is modified to comprise an acyl group. The acyl group can be covalently linked directly to an amino acid of the peptide Q, or indirectly to an amino acid of Q via a spacer, wherein the spacer is positioned between the amino acid of Q and the acyl group. Q may be acylated at the same amino acid position where a hydrophilic moiety is linked, or at a different amino acid position. As described herein, Q can be a glucagon superfamily peptide, glucagon related peptide, including a Class 1, 2, 3, 4 or 5 glucagon related peptide, or osteocalcin, calcitonin, amylin, or an analog, derivative or conjugate thereof. For example, Q may be one of Class 1, Class 2, Class 3, Class 4 or Class 5, and may comprise an acyl group which is non-native to a naturally-occurring amino acid. Acylation can be carried out at any position within Q. Where Q is a glucagon related peptide, acylation may occur at any position including any of positions 1-29, a position within a C-terminal extension, or the C-terminal amino acid, provided that the activity exhibited by the non-acylated glucagon related peptide is retained upon acylation. For example, if the unacylated peptide has glucagon agonist activity, then the acylated peptide retains the glucagon agonist activity. Also for example, if the unacylated peptide has glucagon antagonist activity, then the acylated peptide retains the glucagon antagonist activity. For instance, if the unacylated peptide has GLP-1 agonist activity, then the acylated peptide retains GLP-1 agonist activity. Nonlimiting examples include acylation at positions 5, 7, 10, 11, 12, 13, 14, 16, 17, 18, 19, 20, 21, 24, 27, 28, or 29 (according to the amino acid numbering of wild type glucagon). With regard to Class 1, Class 2, and Class 3 glucagon related peptides, acylation may occur at any of positions 5, 7, 10, 11, 12, 13, 14, 16, 17, 18, 19, 20, 21, 24, 27, 28, 29, 30, 37, 38, 39, 40, 41, 42, or 43 (according to the amino acid numbering of wild type glucagon). Other nonlimiting examples with respect to glucagon related peptides (e.g., Class 1, 2, 3, 4, or 5) include acylation at position 10 (according to the amino acid numbering of the wild type glucagon) and pegylation at one or more positions in the C-terminal portion of the glucagon peptide, e.g., position 24, 28 or 29 (according to the amino acid numbering of the wild type glucagon), within a C-terminal extension, or at the C-terminus (e.g., through adding a C-terminal Cys).

[0315] In a specific aspect of the invention, peptide Q (e.g., a glucagon superfamily peptide, a glucagon related peptide, a Class 1, 2, 3, 4 or 5 glucagon related peptide, or osteocalcin, calcitonin, amylin, or an analog, derivative or conjugate thereof) is modified to comprise an acyl group by direct acylation of an amine, hydroxyl, or thiol of a side chain of an amino acid of Q. In some embodiments, Q is directly acylated through the side chain amine, hydroxyl, or thiol of an amino acid. In some embodiments, where Q is a glucagon related peptide, acylation is at position 10, 20, 24, or 29 (according to the amino acid numbering of the wild type glucagon). In this regard, the acylated glucagon related peptide can comprise the amino acid sequence of SEQ ID NO: 1601, or a modified amino acid sequence thereof comprising one or more of the amino acid modifications described herein, with at least one of the amino acids at positions 10, 20, 24, and 29 (according to the amino acid numbering of the wild type glucagon) modified to any amino acid comprising a side chain amine, hydroxyl, or thiol. In some specific embodiments of the invention, where Q is a glucagon related peptide, the direct acylation of the Q occurs through the side chain amine, hydroxyl, or thiol of the amino acid at position 10 (according to the amino acid numbering of the wild type glucagon).

[0316] In some embodiments, the amino acid of peptide Q (e.g., a glucagon superfamily peptide, a glucagon related peptide, a Class 1, 2, 3, 4 or 5 glucagon related peptide, or osteocalcin, calcitonin, amylin, or an analog, derivative or conjugate thereof) comprising a side chain amine is an amino acid of Formula I:

[chemical structure]

In some exemplary embodiments, the amino acid of Formula I, is the amino acid wherein n is 4 (Lys) or n is 3 (Orn).

[0317] In other embodiments, the amino acid of peptide Q comprising a side chain hydroxyl is an amino acid of Formula II:

[chemical structure]

In some exemplary embodiments, the amino acid of Formula II is the amino acid wherein n is 1 (Ser).

[0318] In yet other embodiments, the amino acid of peptide Q comprising a side chain thiol is an amino acid of Formula III:

[chemical structure]

In some exemplary embodiments, the amino acid of Formula III is the amino acid wherein n is 1 (Cys).

[0319] In yet other embodiments, the amino acid of peptide Q comprising a side chain amine, hydroxyl, or thiol is a disubstituted amino acid comprising the same structure of Formula I, Formula II, or Formula III, except that the hydrogen bonded to the alpha carbon of the amino acid of Formula I, Formula II, or Formula III is replaced with a second side chain.

[0320] In some embodiments of the invention, the acylated peptide Q (e.g., a glucagon superfamily peptide, a glucagon related peptide, a Class 1, 2, 3, 4 or 5 glucagon related peptide, or osteocalcin, calcitonin, amylin, or an analog, derivative or conjugate thereof) comprises a spacer between the peptide and the acyl group. In some embodiments, Q is covalently bound to the spacer, which is covalently bound to the acyl group. In some exemplary embodiments, Q is modified to comprise an acyl group by acylation of an amine, hydroxyl, or thiol of a spacer, which spacer (where Q is a glucagon related peptide, e.g., Class 1, 2, 3, 4 or 5) is attached to a side chain of an amino acid at position 10, 20, 24, or 29 (according to the amino acid numbering of the wild type glucagon), or at the C-terminal amino acid of the glucagon related peptide. The amino acid of peptide Q to which the spacer is attached can be any amino acid comprising a moiety which permits linkage to the spacer. For example, an amino acid comprising a side chain —NH₂, —OH, or —COOH (e.g., Lys, Orn, Ser, Asp, or Glu) is suitable. An amino acid of peptide Q (e.g., a singly or doubly α-substituted amino acid) comprising a side chain —NH₂, —OH, or —COOH (e.g., Lys, Orn, Ser, Asp, or Glu) is also suitable. In some embodiments where Q is a glucagon related peptide (e.g., Class 1, 2, 3, 4 or 5), the acylated glucagon related peptide can comprise the amino acid sequence of SEQ ID NO: 1601, or a modified amino acid sequence thereof comprising one or more of the amino acid modifications described herein, with at least one of the amino acids at positions 10, 20, 24, and 29 (according to the amino acid numbering of the wild type glucagon) modified to any amino acid comprising a side chain amine, hydroxyl, or carboxylate.

[0321] In some embodiments, the spacer between the peptide Q and the acyl group is an amino acid comprising a side chain amine, hydroxyl, or thiol, or a dipeptide or tripeptide comprising an amino acid comprising a side chain amine, hydroxyl, or thiol. In some embodiments, the amino acid spacer is not γ-Glu. In some embodiments, the dipeptide spacer is not γ-Glu-γ-Glu.

[0322] When acylation occurs through an amine group of the amino acid of the spacer, the acylation can occur through the alpha amine of the amino acid or a side chain amine. In the instance in which the alpha amine is acylated, the spacer amino acid can be any amino acid. For example, the spacer amino acid can be a hydrophobic amino acid, e.g., Gly, Ala, Val, Leu, Ile, Trp, Met, Phe, Tyr. In some embodiments, the spacer amino acid can be, for example, a hydrophobic amino acid, e.g., Gly, Ala, Val, Leu, Ile, Trp, Met, Phe, Tyr, 6-amino hexanoic acid, 5-aminovaleric acid, 7-aminoheptanoic acid, 8-aminooctanoic acid. Alternatively, the spacer amino acid can be an acidic residue, e.g., Asp and Glu. In the instance in which the side chain amine of the spacer amino acid is acylated, the spacer amino acid is an amino acid comprising a side chain amine, e.g., an amino acid of Formula I (e.g., Lys or Orn). In this instance, it is possible for both the alpha amine and the side chain amine of the spacer amino acid to be acylated, such that the peptide is diacylated. Embodiments of the invention include such diacylated molecules.

[0323] When acylation occurs through a hydroxyl group of the amino acid of the spacer, the amino acid or one of the amino acids of the dipeptide or tripeptide can be an amino acid of Formula II. In a specific exemplary embodiment, the amino acid is Ser.

[0324] When acylation occurs through a thiol group of the amino acid of the spacer, the amino acid or one of the amino acids of the dipeptide or tripeptide can be an amino acid of Formula III. In a specific exemplary embodiment, the amino acid is Cys.

[0325] In some embodiments, the spacer comprises a hydrophilic bifunctional spacer. In a specific embodiment, the spacer comprises an amino poly(alkyloxy)carboxylate. In this regard, the spacer can comprise, for example, NH₂(CH₂CH₂O)ₙ(CH₂)ₘCOOH, wherein m is any integer from 1 to 6 and n is any integer from 2 to 12, such as, e.g., 8-amino-3,6-dioxaoctanoic acid, which is commercially available from Peptides International, Inc. (Louisville, Ky.).

[0326] In some embodiments the spacer between peptide Q and the acyl group comprises a hydrophilic bifunctional spacer. In certain embodiments, the hydrophilic bifunctional spacer comprises two or more reactive groups, e.g., an amine, a hydroxyl, a thiol, and a carboxyl group or any combinations thereof. In certain embodiments, the hydrophilic bifunctional spacer comprises a hydroxyl group and a carboxylate. In other embodiments, the hydrophilic bifunctional spacer comprises an amine group and a carboxylate. In other embodiments, the hydrophilic bifunctional spacer comprises a thiol group and a carboxylate.

[0327] In some embodiments, the spacer between peptide Q and the acyl group is a hydrophobic bifunctional spacer. Hydrophobic bifunctional spacers are known in the art. See, e.g., Bioconjugate Techniques, G. T. Hermanson (Academic Press, San Diego, Calif., 1996), which is incorporated by reference in its entirety. In certain embodiments, the hydrophobic bifunctional spacer comprises two or more reactive groups, e.g., an amine, a hydroxyl, a thiol, and a carboxyl group or any combinations thereof. In certain embodiments, the hydrophobic bifunctional spacer comprises a hydroxyl group and a carboxylate. In other embodiments, the hydrophobic bifunctional spacer comprises an amine group and a carboxylate. In other embodiments, the hydrophobic bifunctional spacer comprises a thiol group and a carboxylate. Suitable hydrophobic bifunctional spacers comprising a carboxylate and a hydroxyl group or a thiol group are known in the art and include, for example, 8-hydroxyoctanoic acid and 8-mercaptooctanoic acid.

[0328] In some embodiments, the bifunctional spacer is not a dicarboxylic acid comprising an unbranched, methylene of 1 to 7 carbon atoms between the carboxylate groups. In some embodiments, the bifunctional spacer is a dicarboxylic acid comprising an unbranched, methylene of 1-7 carbon atoms between the carboxylate groups.

[0329] The spacer (e.g., amino acid, dipeptide, tripeptide, hydrophilic bifunctional spacer, or hydrophobic bifunctional spacer) in specific embodiments, wherein Q is a Class 1, Class 2, or Class 3 glucagon related peptide, is 3 to 10 atoms (e.g., 6 to 10 atoms, (e.g., 6, 7, 8, 9, or 10 atoms) in length. In more specific embodiments in which Q is a Class 1, Class 2, or Class 3 glucagon related peptide, the spacer is about 3 to 10 atoms (e.g., 6 to 10 atoms) in length and the acyl group is a C12 to C18 fatty acyl group, e.g., C14 fatty acyl group, C16 fatty acyl group, such that the total length of the spacer and acyl group is 14 to 28 atoms, e.g., about 14, 15, 16, 17, 18, 19, 20, 21, 22, 23, 24, 25, 26, 27, or 28 atoms. In some embodiments, in which Q is a Class 1, Class 2, or Class 3 glucagon related peptide the length of the spacer and acyl group is 17 to 28 (e.g., 19 to 26, 19 to 21) atoms.

[0330] In accordance with certain embodiments in which Q is a Class 1, Class 2, or Class 3 glucagon related peptide, the bifunctional spacer can be a synthetic or naturally occurring amino acid (including, but not limited to, any of those described herein) comprising an amino acid backbone that is 3 to 10 atoms in length (e.g., 6-amino hexanoic acid, 5-aminovaleric acid, 7-aminoheptanoic acid, and 8-aminooctanoic acid). Alternatively, the spacer attached to the Class 1, Class 2, or Class 3 glucagon related peptide can be a dipeptide or tripeptide spacer having a peptide backbone that is 3 to 10 atoms (e.g., 6 to 10 atoms) in length. Each amino acid of the dipeptide or tripeptide spacer attached to the Class 1, Class 2, or Class 3 glucagon related peptide can be the same as or different from the other amino acid(s) of the dipeptide or tripeptide and can be independently selected from the group consisting of: naturally-occurring and/or non-naturally occurring amino acids, including, for example, any of the D or L isomers of the naturally-occurring amino acids (Ala, Cys, Asp, Glu, Phe, Gly, His, Ile, Lys, Leu, Met, Asn, Pro, Arg, Ser, Thr, Val, Trp, Tyr), or any D or L isomers of the non-naturally occurring amino acids selected from the group consisting of: β-alanine (β-Ala), N-α-methyl-alanine (Me-Ala), aminobutyric acid (Abu), α-aminobutyric acid (γ-Abu), aminohexanoic acid (ε-Ahx), aminoisobutyric acid (Aib), aminomethylpyrrole carboxylic acid, aminopiperidinecarboxylic acid, aminoserine (Ams), aminotetrahydropyran-4-carboxylic acid, arginine N-methoxy-N-methyl amide, β-aspartic acid (β-Asp), azetidine carboxylic acid, 3-(2-benzothiazolyl)alanine, α-tert-butylglycine, 2-amino-5-ureido-n-valeric acid (citrulline, Cit), β-Cyclohexylalanine (Cha), acetamidomethyl-cysteine, diaminobutanoic acid (Dab), diaminopropionic acid (Dpr), dihydroxyphenylalanine (DOPA), dimethylthiazolidine (DMTA), γ-Glutamic acid (γ-Glu), homoserine (Hse), hydroxyproline (Hyp), isoleucine N-methoxy-N-methyl amide, methyl-isoleucine (MeIle), isonipecotic acid (Isn), methyl-leucine (MeLeu), methyl-lysine, dimethyl-lysine, trimethyl-lysine, methanoproline, methionine-sulfoxide (Met(O)), methionine-sulfone (Met(O2)), norleucine (Nle), methyl-norleucine (Me-Nle), norvaline (Nva), ornithine (Orn), para-aminobenzoic acid (PABA), penicillamine (Pen), methylphenylalanine (MePhe), 4-Chlorophenylalanine (Phe(4-C1)), 4-fluorophenylalanine (Phe(4-F)), 4-nitrophenylalanine (Phe(4-NO2)), 4-cyanophenylalanine ((Phe(4-CN)), phenylglycine (Phg), piperidinylalanine, piperidinylglycine, 3,4-dehydroproline, pyrrolidinylalanine, sarcosine (Sar), selenocysteine (Sec), O-Benzyl-phosphoserine, 4-amino-3-hydroxy-6-methylheptanoic acid (Sta), 4-amino-5-cyclohexyl-3-hydroxypentanoic acid (ACHPA), 4-amino-3-hydroxy-5-phenylpentanoic acid (AHPPA), 1,2,3,4,-tetrahydro-isoquinoline-3-carboxylic acid (Tic), tetrahydropyranglycine, thienylalanine (Thi), O-benzyl-phosphotyrosine, O-Phosphotyrosine, methoxytyrosine, ethoxytyrosine, O-(bis-dimethylamino-phosphono)-tyrosine, tyrosine sulfate tetrabutylamine, methyl-valine (MeVal), 1-amino-1-cyclohexane carboxylic acid (Acx), aminovaleric acid, beta-cyclopropyl-alanine (Cpa), propargylglycine (Prg), allylglycine (Alg), 2-amino-2-cyclohexyl-propanoic acid (2-Cha), tertbutylglycine (Tbg), vinylglycine (Vg), 1-amino-1-cyclopropane carboxylic acid (Acp), 1-amino-1-cyclopentane carboxylic acid (Acpe), alkylated 3-mercaptopropionic acid, 1-amino-1-cyclobutane carboxylic acid (Acb).

[0331] In some embodiments in which Q is a Class 1, Class 2, or Class 3 glucagon related peptide, the spacer comprises an overall negative charge, e.g., comprises one or two negatively charged amino acids. In some embodiments in which Q is a Class 1, Class 2, or Class 3 glucagon related peptide, the dipeptide is not any of the dipeptides of general structure A-B, wherein A is selected from the group consisting of Gly, Gln, Ala, Arg, Asp, Asn, Ile, Leu, Val, Phe, and Pro, wherein B is selected from the group consisting of Lys, H is, Trp. In some embodiments in which Q is a Class 1, Class 2, or Class 3 glucagon related peptide, the dipeptide spacer is selected from the group consisting of: Ala-Ala, β-Ala-β-Ala, Leu-Leu, Pro-Pro, γ-aminobutyric acid-γ-aminobutyric acid, and γ-Glu-γ-Glu.

[0332] The peptide Q can be modified to comprise an acyl group by acylation of a long chain alkane. In specific aspects, the long chain alkane comprises an amine, hydroxyl, or thiol group (e.g. octadecylamine, tetradecanol, and hexadecanethiol) which reacts with a carboxyl group, or activated form thereof, of the peptide Q. The carboxyl group, or activated form thereof, of Q can be part of a side chain of an amino acid (e.g., glutamic acid, aspartic acid) of Q or can be part of the peptide backbone.

[0333] In certain embodiments, the peptide Q is modified to comprise an acyl group by acylation of the long chain alkane by a spacer which is attached to Q. In specific aspects, the long chain alkane comprises an amine, hydroxyl, or thiol group which reacts with a carboxyl group, or activated form thereof, of the spacer. Suitable spacers comprising a carboxyl group, or activated form thereof, are described herein and include, for example, bifunctional spacers, e.g., amino acids, dipeptides, tripeptides, hydrophilic bifunctional spacers and hydrophobic bifunctional spacers.

[0334] As used herein, the term “activated form of a carboxyl group” refers to a carboxyl group with the general formula R(C═O)X, wherein X is a leaving group and R is Q or the spacer. For example, activated forms of a carboxyl groups may include, but are not limited to, acyl chlorides, anhydrides, and esters. In some embodiments, the activated carboxyl group is an ester with a N-hydroxysuccinimide (NHS) leaving group.

[0335] With regard to these aspects of the invention, in which a long chain alkane is acylated by the peptide Q or the spacer, the long chain alkane may be of any size and can comprise any length of carbon chain. The long chain alkane can be linear or branched. In certain aspects, the long chain alkane is a C4 to C30 alkane. For example, the long chain alkane can be any of a C4 alkane, C6 alkane, C8 alkane, C10 alkane, C12 alkane, C14 alkane, C16 alkane, C18 alkane, C20 alkane, C22 alkane, C24 alkane, C26 alkane, C28 alkane, or a C30 alkane. In some embodiments, the long chain alkane comprises a C8 to C20 alkane, e.g., a C14 alkane, C16 alkane, or a C18 alkane.

[0336] In some embodiments, an amine, hydroxyl, or thiol group of Q is acylated with a cholesterol acid. In a specific embodiment, the peptide is linked to the cholesterol acid through an alkylated des-amino Cys spacer, i.e., an alkylated 3-mercaptopropionic acid spacer.

[0337] Suitable methods of peptide acylation via amines, hydroxyls, and thiols are known in the art. See, for example, Miller, Biochem Biophys Res Commun 218: 377-382 (1996); Shimohigashi and Stammer, Int J Pept Protein Res 19: 54-62 (1982); and Previero et al., Biochim Biophys Acta 263: 7-13 (1972) (for methods of acylating through a hydroxyl); and San and Silvius, J Pept Res 66: 169-180 (2005) (for methods of acylating through a thiol); Bioconjugate Chem. “Chemical Modifications of Proteins: History and Applications” pages 1, 2-12 (1990); Hashimoto et al., Pharmacuetical Res. “Synthesis of Palmitoyl Derivatives of Insulin and their Biological Activity” Vol. 6, No: 2 pp. 171-176 (1989).

[0338] The acyl group of the acylated peptide Q can be of any size, e.g., any length carbon chain, and can be linear or branched. In some specific embodiments of the invention, the acyl group is a C4 to C30 fatty acid. For example, the acyl group can be any of a C4 fatty acid, C6 fatty acid, C8 fatty acid, C10 fatty acid, C12 fatty acid, C14 fatty acid, C16 fatty acid, C18 fatty acid, C20 fatty acid, C22 fatty acid, C24 fatty acid, C26 fatty acid, C28 fatty acid, or a C30 fatty acid. In some embodiments, the acyl group is a C8 to C20 fatty acid, e.g., a C14 fatty acid or a C16 fatty acid.

[0339] In an alternative embodiment, the acyl group is a bile acid. The bile acid can be any suitable bile acid, including, but not limited to, cholic acid, chenodeoxycholic acid, deoxycholic acid, lithocholic acid, taurocholic acid, glycocholic acid, and cholesterol acid.

[0340] The acylated peptides Q described herein can be further modified to comprise a hydrophilic moiety. In some specific embodiments the hydrophilic moiety can comprise a polyethylene glycol (PEG) chain. The incorporation of a hydrophilic moiety can be accomplished through any suitable means, such as any of the methods described herein. In some embodiments related to Class 1, 2, 3, 4 or 5 glucagon related peptides, the acylated glucagon related peptide can comprise SEQ ID NO: 1601, including any of the modifications described herein, in which at least one of the amino acids at position 10, 20, 24, and 29 (according to the amino acid numbering of the wild type glucagon) comprise an acyl group and at least one of the amino acids at position 16, 17, 21, 24, or 29 (according to the amino acid numbering of the wild type glucagon), a position within a C-terminal extension, or the C-terminal amino acid are modified to a Cys, Lys, Orn, homo-Cys, or Ac-Phe, and the side chain of the amino acid is covalently bonded to a hydrophilic moiety (e.g., PEG). In some embodiments related to Class 1, 2, 3, 4 or 5 glucagon related peptides, the acyl group is attached to position 10 (according to the amino acid numbering of the wild type glucagon), optionally via a spacer comprising Cys, Lys, Orn, homo-Cys, or Ac-Phe, and the hydrophilic moiety is incorporated at a Cys residue at position 24.

[0341] Alternatively, the acylated peptide (Q) can comprise a spacer, wherein the spacer is both acylated and modified to comprise the hydrophilic moiety. Nonlimiting examples of suitable spacers include a spacer comprising one or more amino acids selected from the group consisting of Cys, Lys, Orn, homo-Cys, and Ac-Phe.

### Alkylation of Q

[0342] In some embodiments, Q is modified to comprise an alkyl group. The alkyl group can be covalently linked directly to an amino acid of the peptide Q, or indirectly to an amino acid of Q via a spacer, wherein the spacer is positioned between the amino acid of Q and the alkyl group. The alkyl group can be attached to Q via an ether, thioether, or amino linkage, for example. Q may be alkylated at the same amino acid position where a hydrophilic moiety is linked, or at a different amino acid position. As described herein, Q can be a glucagon superfamily peptide, glucagon related peptide, including a Class 1, 2, 3, 4 or 5 glucagon related peptide, or osteocalcin, calcitonin, amylin, or an analog, derivative or conjugate thereof. For example, Q may be a Class 1, Class 2, or Class 3 glucagon related peptide, and may comprise an alkyl group which is non-native to a naturally-occurring amino acid.

[0343] Alkylation can be carried out at any position within Q. Where Q is a glucagon related peptide, alkylation may occur at any position including any of positions 1-29, a position within a C-terminal extension, or the C-terminal amino acid, provided that an agonist activity of the unalkyated peptide with respect to glucagon, GLP-1, GIP or other glucagon-related peptide receptor is retained upon alkylation. In some embodiments, if the unalkylated peptide has glucagon agonist activity, then the alkylated peptide retains glucagon agonist activity is retained. In some embodiments, if the unalkylated peptide has GLP-1 agonist activity, then the alkylated peptide retains GLP-1 agonist activity. Nonlimiting examples include alkylation at positions 5, 7, 10, 11, 12, 13, 14, 16, 17, 18, 19, 20, 21, 24, 27, 28, or 29 (according to the amino acid numbering of wild type glucagon). With regard to Class 1, Class 2, and Class 3 glucagon related peptides, alkylation can occur at positions 5, 7, 10, 11, 12, 13, 14, 16, 17, 18, 19, 20, 21, 24, 27, 28, 29, 30, 37, 38, 39, 40, 41, 42, or 43 (according to the amino acid numbering of wild type glucagon). Other nonlimiting examples with respect to glucagon related peptides (e.g. Class, 1, 2, 3, 4 or 5) include alkylation at position 10 (according to the amino acid numbering of wild type glucagon) and pegylation at one or more positions in the C-terminal portion of the glucagon related peptide, e.g., position 24, 28 or 29 (according to the amino acid numbering of wild type glucagon), within a C-terminal extension, or at the C-terminus (e.g., through adding a C-terminal Cys).

[0344] In a specific aspect of the invention, peptide Q (e.g. a glucagon superfamily peptide, a glucagon related peptide, a Class 1, 2, 3, 4 or 5 glucagon related peptide, or osteocalcin, calcitonin, amylin, or an analog, derivative or conjugate thereof) is modified to comprise an alkyl group by direct alkylation of an amine, hydroxyl, or thiol of a side chain of an amino acid of Q. In some embodiments, Q is directly alkylated through the side chain amine, hydroxyl, or thiol of an amino acid. In some embodiments, where Q is a glucagon related peptide, alkylation is at position 10, 20, 24, or 29 (according to the amino acid numbering of wild type glucagon). In this regard, the alkylated glucagon related peptide can comprise the amino acid sequence of SEQ ID NO: 1601, or a modified amino acid sequence thereof comprising one or more of the amino acid modifications described herein, with at least one of the amino acids at positions 10, 20, 24, and 29 (according to the amino acid numbering of wild type glucagon) modified to any amino acid comprising a side chain amine, hydroxyl, or thiol. In some specific embodiments of the invention, where Q is a glucagon related peptide, the direct alkylation of Q occurs through the side chain amine, hydroxyl, or thiol of the amino acid at position 10 (according to the amino acid numbering of wild type glucagon).

[0345] In some embodiments, the amino acid of peptide Q (e.g. a glucagon superfamily peptide, a glucagon related peptide, a Class 1, 2, 3, 4 or 5 glucagon related peptide, or osteocalcin, calcitonin, amylin, or an analog, derivative or conjugate thereof) comprising a side chain amine is an amino acid of Formula I. In some exemplary embodiments, the amino acid of Formula I, is the amino acid wherein n is 4 (Lys) or n is 3 (Orn).

[0346] In other embodiments, the amino acid of peptide Q comprising a side chain hydroxyl is an amino acid of Formula II. In some exemplary embodiments, the amino acid of Formula II is the amino acid wherein n is 1 (Ser).

[0347] In yet other embodiments, the amino acid of peptide Q comprising a side chain thiol is an amino acid of Formula III. In some exemplary embodiments, the amino acid of Formula II is the amino acid wherein n is 1 (Cys).

[0348] In yet other embodiments, the amino acid of peptide Q comprising a side chain amine, hydroxyl, or thiol is a disubstituted amino acid comprising the same structure of Formula I, Formula II, or Formula III, except that the hydrogen bonded to the alpha carbon of the amino acid of Formula I, Formula II, or Formula III is replaced with a second side chain.

[0349] In some embodiments of the invention, the alkylated peptide Q (e.g. a glucagon superfamily peptide, a glucagon related peptide, a Class 1, 2, 3, 4 or 5 glucagon related peptide, or osteocalcin, calcitonin, amylin, or an analog, derivative or conjugate thereof) comprises a spacer between the peptide and the alkyl group. In some embodiments, the Q is covalently bound to the spacer, which is covalently bound to the alkyl group. In some exemplary embodiments, peptide Q is modified to comprise an alkyl group by alkylation of an amine, hydroxyl, or thiol of a spacer, which spacer (where Q is a glucagon related peptide, e.g., Class 1, 2, 3, 4 or 5) is attached to a side chain of an amino acid at position 10, 20, 24, or 29 (according to the amino acid numbering of wild type glucagon) of Q. The amino acid of peptide Q to which the spacer is attached can be any amino acid comprising a moiety which permits linkage to the spacer. The amino acid of peptide Q to which the spacer is attached can be any amino acid (e.g., a singly α-substituted amino acid or an α,α-disubstituted amino acid) comprising a moiety which permits linkage to the spacer. An amino acid of peptide Q comprising a side chain —NH₂, —OH, or —COOH (e.g., Lys, Orn, Ser, Asp, or Glu) is suitable. In some embodiments where Q is a glucagon related peptide (e.g., Class 1, 2, 3, 4 or 5), the alkylated Q can comprise the amino acid sequence of SEQ ID NO: 1601, or a modified amino acid sequence thereof comprising one or more of the amino acid modifications described herein, with at least one of the amino acids at positions 10, 20, 24, and 29 (according to the amino acid numbering of wild type glucagon) modified to any amino acid comprising a side chain amine, hydroxyl, or carboxylate.

[0350] In some embodiments, the spacer between the peptide Q and the alkyl group is an amino acid comprising a side chain amine, hydroxyl, or thiol or a dipeptide or tripeptide comprising an amino acid comprising a side chain amine, hydroxyl, or thiol. In some embodiments, the amino acid spacer is not γ-Glu. In some embodiments, the dipeptide spacer is not γ-Glu-γ-Glu.

[0351] When alkylation occurs through an amine group of the amino acid of the spacer the alkylation can occur through the alpha amine of the amino acid or a side chain amine. In the instance in which the alpha amine is alkylated, the spacer amino acid can be any amino acid. For example, the spacer amino acid can be a hydrophobic amino acid, e.g., Gly, Ala, Val, Leu, Ile, Trp, Met, Phe, Tyr. Alternatively, the spacer amino acid can be an acidic residue, e.g., Asp and Glu. In exemplary embodiments, the spacer amino acid can be a hydrophobic amino acid, e.g., Gly, Ala, Val, Leu, Ile, Trp, Met, Phe, Tyr, 6-amino hexanoic acid, 5-aminovaleric acid, 7-aminoheptanoic acid, 8-aminooctanoic acid. Alternatively, the spacer amino acid can be an acidic residue, e.g., Asp and Glu, provided that the alkylation occurs on the alpha amine of the acidic residue. In the instance in which the side chain amine of the spacer amino acid is alkylated, the spacer amino acid is an amino acid comprising a side chain amine, e.g., an amino acid of Formula I (e.g., Lys or Orn). In this instance, it is possible for both the alpha amine and the side chain amine of the spacer amino acid to be alkylated, such that the peptide is dialkylated. Embodiments of the invention include such dialkylated molecules.

[0352] When alkylation occurs through a hydroxyl group of the amino acid of the spacer, the amino acid or one of the amino acids of the spacer can be an amino acid of Formula II. In a specific exemplary embodiment, the amino acid is Ser.

[0353] When alkylation occurs through a thiol group of the amino acid of the spacer, the amino acid or one of the amino acids of the spacer can be an amino acid of Formula III. In a specific exemplary embodiment, the amino acid is Cys.

[0354] In some embodiments, the spacer comprises a hydrophilic bifunctional spacer. In a specific embodiment, the spacer comprises an amino poly(alkyloxy)carboxylate. In this regard, the spacer can comprise, for example, NH₂(CH₂CH₂O)ₙ(CH₂)ₘCOOH, wherein m is any integer from 1 to 6 and n is any integer from 2 to 12, such as, e.g., 8-amino-3,6-dioxaoctanoic acid, which is commercially available from Peptides International, Inc. (Louisville, Ky.).

[0355] In some embodiments, the spacer between peptide Q and the alkyl group is a hydrophilic bifunctional spacer. In certain embodiments, the hydrophilic bifunctional spacer comprises two or more reactive groups, e.g., an amine, a hydroxyl, a thiol, and a carboxyl group or any combinations thereof. In certain embodiments, the hydrophilic bifunctional spacer comprises a hydroxyl group and a carboxylate. In other embodiments, the hydrophilic bifunctional spacer comprises an amine group and a carboxylate. In other embodiments, the hydrophilic bifunctional spacer comprises a thiol group and a carboxylate.

[0356] In some embodiments, the spacer between peptide Q and the alkyl group is a hydrophobic bifunctional spacer. In certain embodiments, the hydrophobic bifunctional spacer comprises two or more reactive groups, e.g., an amine, a hydroxyl, a thiol, and a carboxyl group or any combinations thereof. In certain embodiments, the hydrophobic bifunctional spacer comprises a hydroxyl group and a carboxylate. In other embodiments, the hydropholic bifunctional spacer comprises an amine group and a carboxylate. In other embodiments, the hydropholic bifunctional spacer comprises a thiol group and a carboxylate. Suitable hydrophobic bifunctional spacers comprising a carboxylate and a hydroxyl group or a thiol group are known in the art and include, for example, 8-hydroxyoctanoic acid and 8-mercaptooctanoic acid.

[0357] The spacer (e.g., amino acid, dipeptide, tripeptide, hydrophilic bifunctional spacer, or hydrophobic bifunctional spacer) in specific embodiments in which Q is a Class 1, Class 2, or Class 3 glucagon related peptide is 3 to 10 atoms (e.g., 6 to 10 atoms, (e.g., 6, 7, 8, 9, or 10 atoms)) in length. In more specific embodiments, the spacer attached to the Class 1, Class 2, or Class 3 glucagon related peptide is about 3 to 10 atoms (e.g., 6 to 10 atoms) in length and the alkyl is a C12 to C18 alkyl group, e.g., C14 alkyl group, C16 alkyl group, such that the total length of the spacer and alkyl group is 14 to 28 atoms, e.g., about 14, 15, 16, 17, 18, 19, 20, 21, 22, 23, 24, 25, 26, 27, or 28 atoms. In some embodiments in which Q is a Class 1, Class 2, or Class 3 glucagon related peptide, the length of the spacer and alkyl is 17 to 28 (e.g., 19 to 26, 19 to 21) atoms.

[0358] In accordance with certain foregoing embodiments in which Q is a Class 1, Class 2, or Class 3 glucagon related peptide, the bifunctional spacer can be a synthetic or non-naturally occurring amino acid comprising an amino acid backbone that is 3 to 10 atoms in length (e.g., 6-amino hexanoic acid, 5-aminovaleric acid, 7-aminoheptanoic acid, and 8-aminooctanoic acid). Alternatively, the spacer attached to the Class 1, Class 2, or Class 3 glucagon related peptide can be a dipeptide or tripeptide spacer having a peptide backbone that is 3 to 10 atoms (e.g., 6 to 10 atoms) in length. The dipeptide or tripeptide spacer attached to the Class 1, Class 2, or Class 3 glucagon related peptide can be composed of naturally-occurring and/or non-naturally occurring amino acids, including, for example, any of the amino acids taught herein. In some embodiments in which Q is a Class 1, Class 2, or Class 3 glucagon related peptide, the spacer comprises an overall negative charge, e.g., comprises one or two negatively charged amino acids. In some embodiments in which Q is a Class 1, Class 2, or Class 3 glucagon related peptide, the dipeptide spacer is selected from the group consisting of: Ala-Ala, β-Ala-β-Ala, Leu-Leu, Pro-Pro, γ-aminobutyric acid-γ-aminobutyric acid, and γ-Glu-γ-Glu. In some embodiments, the dipeptide spacer is not γ-Glu-γ-Glu.

[0359] Suitable methods of peptide alkylation via amines, hydroxyls, and thiols are known in the art. For example, a Williamson ether synthesis can be used to form an ether linkage between the glucagon related peptide and the alkyl group. Also, a nucleophilic substitution reaction of the peptide with an alkyl halide can result in any of an ether, thioether, or amino linkage.

[0360] The alkyl group of the alkylated peptide Q can be of any size, e.g., any length carbon chain, and can be linear or branched. In some embodiments of the invention, the alkyl group is a C4 to C30 alkyl. For example, the alkyl group can be any of a C4 alkyl, C6 alkyl, C8 alkyl, C10 alkyl, C12 alkyl, C14 alkyl, C16 alkyl, C18 alkyl, C20 alkyl, C22 alkyl, C24 alkyl, C26 alkyl, C28 alkyl, or a C30 alkyl. In some embodiments, the alkyl group is a C8 to C20 alkyl, e.g., a C14 alkyl or a C16 alkyl.

[0361] In some specific embodiments, the alkyl group comprises a steroid moiety of a bile acid, e.g., cholic acid, chenodeoxycholic acid, deoxycholic acid, lithocholic acid, taurocholic acid, glycocholic acid, and cholesterol acid.

[0362] In some embodiments of the invention, peptide Q is modified to comprise an alkyl group by reacting a nucleophilic, long chain alkane with Q, wherein Q comprises a leaving group suitable for nucleophilic substitution. In specific aspects, the nucleophilic group of the long chain alkane comprises an amine, hydroxyl, or thiol group (e.g. octadecylamine, tetradecanol, and hexadecanethiol). The leaving group of Q can be part of a side chain of an amino acid or can be part of the peptide backbone. Suitable leaving groups include, for example, N-hydroxysuccinimide, halogens, and sulfonate esters.

[0363] In certain embodiments, peptide Q is modified to comprise an alkyl group by reacting the nucleophilic, long chain alkane with a spacer, which is attached to Q, wherein the spacer comprises the leaving group. In specific aspects, the long chain alkane comprises an amine, hydroxyl, or thiol group. In certain embodiments, the spacer comprising the leaving group can be any spacer discussed herein, e.g., amino acids, dipeptides, tripeptides, hydrophilic bifunctional spacers and hydrophobic bifunctional spacers further comprising a suitable leaving group.

[0364] With regard to these aspects of the invention in which a long chain alkane is alkylated by peptide Q or the spacer, the long chain alkane may be of any size and can comprise any length of carbon chain. The long chain alkane can be linear or branched. In certain aspects, the long chain alkane is a C4 to C30 alkane. For example, the long chain alkane can be any of a C4 alkane, C6 alkane, C8 alkane, C10 alkane, C12 alkane, C14 alkane, C16 alkane, C18 alkane, C20 alkane, C22 alkane, C24 alkane, C26 alkane, C28 alkane, or a C30 alkane. In some embodiments in which the glucagon related peptide is a Class 1, Class 2, or Class 3 glucagon related peptide, the long chain alkane comprises a C8 to C20 alkane, e.g., a C14 alkane, C16 alkane, or a C₁₈ alkane.

[0365] Also, in some embodiments alkylation can occur between Q and a cholesterol moiety. For example, the hydroxyl group of cholesterol can displace a leaving group on the long chain alkane to form a cholesterol-glucagon peptide product.

[0366] The alkylated peptides (Q) described herein can be further modified to comprise a hydrophilic moiety. In some specific embodiments the hydrophilic moiety can comprise a polyethylene glycol (PEG) chain. The incorporation of a hydrophilic moiety can be accomplished through any suitable means, such as any of the methods described herein. In some embodiments related to Class 1, 2, 3, 4 or 5 glucagon related peptides the alkylated Q can comprise SEQ ID NO: 1601, or a modified amino acid sequence thereof comprising one or more of the amino acid modifications described herein, in which at least one of the amino acids at position 10, 20, 24, and 29 (according to the amino acid numbering of wild type glucagon) comprise an alkyl group and at least one of the amino acids at position 16, 17, 21, 24, and 29, a position within a C-terminal extension or the C-terminal amino acid are modified to a Cys, Lys, Orn, homo-Cys, or Ac-Phe, and the side chain of the amino acid is covalently bonded to a hydrophilic moiety (e.g., PEG). In some embodiments related to Class 1, 2, 3, 4 or 5 glucagon related peptides, the alkyl group is attached to position 10 (according to the amino acid numbering of wild type glucagon), optionally via a spacer comprising Cys, Lys, Orn, homo-Cys, or Ac-Phe, and the hydrophilic moiety is incorporated at a Cys residue at position 24.

[0367] Alternatively, the alkylated peptide Q can comprise a spacer, wherein the spacer is both alkylated and modified to comprise the hydrophilic moiety. Nonlimiting examples of suitable spacers include a spacer comprising one or more amino acids selected from the group consisting of Cys, Lys, Orn, homo-Cys, and Ac-Phe.

### Stabilization of the Alpha-Helix Structure

[0368] In some embodiments, an intramolecular bridge is formed between two amino acid side chains to stabilize the three dimensional structure of the carboxy terminal portion (e.g., amino acids 12-29 (according to the amino acid numbering of wild type glucagon)) of Class 1, 2, 3, 4, or 5 glucagon related peptide Q. The two amino acid side chains can be linked to one another through hydrogen-bonding, ionic interactions, such as the formation of salt bridges, or by covalent bonds.

[0369] In some embodiments, the intramolecular bridge is formed between two amino acids that are 3 amino acids apart, e.g., amino acids at positions i and i+4, wherein i is any integer between 12 and 25 (e.g., 12, 13, 14, 15, 16, 17, 18, 19, 20, 21, 22, 23, 24, and 25) according to the amino acid numbering of wild type glucagon. More particularly, the side chains of the amino acid pairs 12 and 16, 16 and 20, 20 and 24 or 24 and 28 (amino acid pairs in which i=12, 16, 20, or 24) according to the amino acid numbering of wild type glucagon are linked to one another and thus stabilize the glucagon alpha helix. Alternatively, i can be 17.

[0370] In some specific embodiments, wherein the amino acids at positions i and i+4 are joined by an intramolecular bridge, the size of the linker is about 8 atoms, or about 7-9 atoms.

[0371] In other embodiments, the intramolecular bridge is formed between two amino acids that are two amino acids apart, e.g., amino acids at positions j and j+3, wherein j is any integer between 12 and 26 (e.g., 12, 13, 14, 15, 16, 17, 18, 19, 20, 21, 22, 23, 24, 25, and 26) according to the amino acid numbering of wild type glucagon. In some specific embodiments, j is 17.

[0372] In some specific embodiments, wherein amino acids at positions j and j+3 are joined by an intramolecular bridge, the size of the linker is about 6 atoms, or about 5 to 7 atoms.

[0373] In yet other embodiments, the intramolecular bridge is formed between two amino acids that are 6 amino acids apart, e.g., amino acids at positions k and k+7, wherein k is any integer between 12 and 22 (e.g., 12, 13, 14, 15, 16, 17, 18, 19, 20, 21, and 22) according to the amino acid numbering of wild type glucagon. In some specific embodiments, k is 12, 13, or 17. In an exemplary embodiment, k is 17.

[0374] Examples of amino acid pairings that are capable of covalently bonding to form a six-atom linking bridge include Orn and Asp, Glu and an amino acid of Formula I, wherein n is 2, and homoglutamic acid and an amino acid of Formula I, wherein n is 1, wherein Formula I is:

[chemical structure]

[0375] Examples of amino acid pairing that are capable of covalently bonding to form a seven-atom linking bridge include Orn-Glu (lactam ring); Lys-Asp (lactam); or Homoser-Homoglu (lactone). Examples of amino acid pairings that may form an eight-atom linker include Lys-Glu (lactam); Homolys-Asp (lactam); Orn-Homoglu (lactam); 4-aminoPhe-Asp (lactam); or Tyr-Asp (lactone). Examples of amino acid pairings that may form a nine-atom linker include Homolys-Glu (lactam); Lys-Homoglu (lactam); 4-aminoPhe-Glu (lactam); or Tyr-Glu (lactone). Any of the side chains on these amino acids may additionally be substituted with additional chemical groups, so long as the three-dimensional structure of the alpha-helix is not disrupted. One of ordinary skill in the art can envision alternative pairings or alternative amino acid analogs, including chemically modified derivatives that would create a stabilizing structure of similar size and desired effect. For example, a homocysteine-homocysteine disulfide bridge is 6 atoms in length and may be further modified to provide the desired effect. Even without covalent linkage, the amino acid pairings described above or similar pairings that one of ordinary skill in the art can envision may also provide added stability to the alpha-helix through non-covalent bonds, for example, through formation of salt bridges or hydrogen-bonding interactions.

[0376] The size of a lactam ring can vary depending on the length of the amino acid side chains, and in some embodiments the lactam is formed by linking the side chains of a lysine amino acid to a glutamic acid side chain. Further exemplary embodiments (according to the amino acid numbering of wild type glucagon) include the following pairings, optionally with a lactam bridge: Glu at position 12 with Lys at position 16; native Lys at position 12 with Glu at position 16; Glu at position 16 with Lys at position 20; Lys at position 16 with Glu at position 20; Glu at position 20 with Lys at position 24; Lys at position 20 with Glu at position 24; Glu at position 24 with Lys at position 28; Lys at position 24 with Glu at position 28. Alternatively, the order of the amide bond in the lactam ring can be reversed (e.g., a lactam ring can be formed between the side chains of a Lys12 and a Glu16 or alternatively between a Glu 12 and a Lys16).

[0377] Intramolecular bridges other than a lactam bridge can be used to stabilize the alpha helix of Q. In some embodiments, the intramolecular bridge is a hydrophobic bridge. In this instance, the intramolecular bridge optionally is between the side chains of two amino acids that are part of the hydrophobic face of the alpha helix of Q. For example, one of the amino acids joined by the hydrophobic bridge can be the amino acid at position 10, 14, and 18 (according to the amino acid numbering of wild type glucagon).

[0378] In one specific aspect, olefin metathesis is used to cross-link one or two turns of the alpha helix of Q using an all-hydrocarbon cross-linking system. Q in this instance can comprise α-methylated amino acids bearing olefinic side chains of varying length and configured with either R or S stereochemistry at the i and i+4 or i+7 positions. For example, the olefinic side can comprise (CH₂)ₙ, wherein n is any integer between 1 to 6. In some embodiments, n is 3 for a cross-link length of 8 atoms. Suitable methods of forming such intramolecular bridges are described in the art. See, for example, Schafineister et al., J. Am. Chem. Soc. 122: 5891-5892 (2000) and Walensky et al., Science 305: 1466-1470 (2004). Alternatively, Q can comprise O-allyl Ser residues located on adjacent helical turns, which are bridged together via ruthenium-catalyzed ring closing metathesis. Such procedures of cross-linking are described in, for example, Blackwell et al., Angew, Chem., Int. Ed. 37: 3281-3284 (1998).

[0379] In another specific aspect, use of the unnatural thio-dialanine amino acid, lanthionine, which has been widely adopted as a peptidomimetic of cystine, is used to cross-link one turn of the alpha helix. Suitable methods of lanthionine-based cyclization are known in the art. See, for instance, Matteucci et al., Tetrahedron Letters 45: 1399-1401 (2004); Mayer et al., J. Peptide Res. 51: 432-436 (1998); Polinsky et al., J. Med. Chem. 35: 4185-4194 (1992); Osapay et al., J. Med. Chem. 40: 2241-2251 (1997); Fukase et al., Bull. Chem. Soc. Jpn. 65: 2227-2240 (1992); Harpp et al., J. Org. Chem. 36: 73-80 (1971); Goodman and Shao, Pure Appl. Chem. 68: 1303-1308 (1996); and Osapay and Goodman, J. Chem. Soc. Chem. Commun. 1599-1600 (1993).

[0380] In some embodiments, α,ω-diaminoalkane tethers, e.g., 1,4-diaminopropane and 1,5-diaminopentane) between two Glu residues at positions i and i+7 are used to stabilize the alpha helix of Q. Such tethers lead to the formation of a bridge of 9-atoms or more in length, depending on the length of the diaminoalkane tether. Suitable methods of producing peptides cross-linked with such tethers are described in the art. See, for example, Phelan et al., J. Am. Chem. Soc. 119: 455-460 (1997).

[0381] In yet another embodiment of the invention, a disulfide bridge is used to cross-link one or two turns of the alpha helix of Q. Alternatively, a modified disulfide bridge in which one or both sulfur atoms are replaced by a methylene group resulting in an isosteric macrocyclization is used to stabilize the alpha helix of Q. Suitable methods of modifying peptides with disulfide bridges or sulfur-based cyclization are described in, for example, Jackson et al., J. Am. Chem. Soc. 113: 9391-9392 (1991) and Rudinger and Jost, Experientia 20: 570-571 (1964).

[0382] In yet another embodiment, the alpha helix of Q is stabilized via the binding of metal atom by two His residues or a His and Cys pair positioned at i and i+4. The metal atom can be, for example, Ru(III), Cu(II), Zn(II), or Cd(II). Such methods of metal binding-based alpha helix stabilization are known in the art. See, for example, Andrews and Tabor, Tetrahedron 55: 11711-11743 (1999); Ghadiri et al., J. Am. Chem. Soc. 112: 1630-1632 (1990); and Ghadiri et al., J. Am. Chem. Soc. 119: 9063-9064 (1997).

[0383] The alpha helix of Q can alternatively be stabilized through other means of peptide cyclizing, which means are reviewed in Davies, J. Peptide. Sci. 9: 471-501 (2003). The alpha helix can be stabilized via the formation of an amide bridge, thioether bridge, thioester bridge, urea bridge, carbamate bridge, sulfonamide bridge, and the like. For example, a thioester bridge can be formed between the C-terminus and the side chain of a Cys residue. Alternatively, a thioester can be formed via side chains of amino acids having a thiol (Cys) and a carboxylic acid (e.g., Asp, Glu). In another method, a cross-linking agent, such as a dicarboxylic acid, e.g. suberic acid (octanedioic acid), etc. can introduce a link between two functional groups of an amino acid side chain, such as a free amino, hydroxyl, thiol group, and combinations thereof.

[0384] In accordance with some embodiments, the alpha helix of Q is stabilized through the incorporation of hydrophobic amino acids at positions i and i+4. For instance, i can be Tyr and i+4 can be either Val or Leu; i can be Phe and i+4 can be Cys or Met; I can be Cys and i+4 can be Met; or i can be Phe and i+4 can be Ile. It should be understood that, for purposes herein, the above amino acid pairings can be reversed, such that the indicated amino acid at position i could alternatively be located at i+4, while the i+4 amino acid can be located at the i position.

[0385] In accordance with other embodiments of the invention, wherein Q is a glucagon related peptide, the alpha helix is stabilized through incorporation (either by amino acid substitution or insertion) of one or more alpha helix-stabilizing amino acids at the C-terminal portion of Q (around amino acids 12-29 according to the numbering of the amino acid numbering of wild type glucagon). In a specific embodiment, the alpha helix-stabilizing amino acid is an α,α-disubstituted amino acid, including, but not limited to any of amino iso-butyric acid (Aib), an amino acid disubstituted with the same or a different group selected from methyl, ethyl, propyl, and n-butyl, or with a cyclooctane or cycloheptane (e.g., 1-aminocyclooctane-1-carboxylic acid). In some embodiments, one, two, three, four or more of positions 16, 17, 18, 19, 20, 21, 24 or 29 of the glucagon related peptide is substituted with an α,α-disubstituted amino acid. In a specific embodiment, one, two, three or all of positions 16, 20, 21, and 24 are substituted with Aib.

### Conjugates

[0386] In some embodiments, the peptides (Q) described herein are glycosylated, amidated, carboxylated, phosphorylated, esterified, N-acylated, cyclized via, e.g., a disulfide bridge, or converted into a salt (e.g., an acid addition salt, a basic addition salt), and/or optionally dimerized, multimerized, or polymerized, or conjugated. As described herein, Q can be a glucagon superfamily peptide, glucagon related peptide, including a Class 1, 2, 3, 4 or 5 glucagon related peptide, or osteocalcin, calcitonin, amylin, or an analog, derivative or conjugate thereof.

[0387] The present disclosure also encompasses conjugates in which Q of Q-L-Y is further linked to a heterologous moiety. The conjugation between Q and the heterologous moiety can be through covalent bonding, non-covalent bonding (e.g. electrostatic interactions, hydrogen bonds, van der Waals interactions, salt bridges, hydrophobic interactions, and the like), or both types of bonding. A variety of non-covalent coupling systems may be used, including biotin-avidin, ligand/receptor, enzyme/substrate, nucleic acid/nucleic acid binding protein, lipid/lipid binding protein, cellular adhesion molecule partners; or any binding partners or fragments thereof which have affinity for each other. In some aspects, the covalent bonds are peptide bonds. The conjugation of Q to the heterologous moiety may be indirect or direct conjugation, the former of which may involve a linker or spacer. Suitable linkers and spacers are known in the art and include, but not limited to, any of the linkers or spacers described herein under the sections “Acylation and alkylation” and “The Linking Group,” and in the subsection “Chemical Modification of Q and/or L.”

[0388] As used herein, the term “heterologous moiety” is synonymous with the term “conjugate moiety” and refers to any molecule (chemical or biochemical, naturally-occurring or non-coded) which is different from Q to which it is attached. Exemplary conjugate moieties that can be linked to Q include but are not limited to a heterologous peptide or polypeptide (including for example, a plasma protein), a targeting agent, an immunoglobulin or portion thereof (e.g., variable region, CDR, or Fc region), a diagnostic label such as a radioisotope, fluorophore or enzymatic label, a polymer including water soluble polymers, or other therapeutic or diagnostic agents. In some embodiments a conjugate is provided comprising Q and a plasma protein, wherein the plasma protein is selected from the group consisting of albumin, transferin, fibrinogen and globulins. In some embodiments the plasma protein moiety of the conjugate is albumin or transferin. The conjugate in some embodiments comprises Q and one or more of a polypeptide, a nucleic acid molecule, an antibody or fragment thereof, a polymer, a quantum dot, a small molecule, a toxin, a diagnostic agent, a carbohydrate, an amino acid.

[0389] C-Terminal Heterologous Moiety

[0390] In some embodiments, the heterologous moiety conjugated to Q is a peptide which is distinct from Q and the conjugate is a fusion peptide or a chimeric peptide. In some embodiments, where Q is a glucagon superfamily peptide, the heterologous moiety is a peptide extension of 1-21 amino acids. In specific embodiments, where Q is a glucagon related peptide (e.g. a Class 1, 2, 3, 4 or 5 glucagon related peptide), the extension is attached to the C-terminus of Q, e.g., to amino acid at position 29. In some embodiments, the extension comprises an amino acid sequence of SEQ ID NO: 1610 (GPSSGAPPPS), SEQ ID NO: 1611 (GGPSSGAPPPS-CONH₂), SEQ ID NO: 1614 (KRNRNNIA), SEQ ID NO: 1643 (KRNR), or KGKKNDWKHNITQ (SEQ ID NO: 1613). In specific aspects, the amino acid sequence is attached through the C-terminal amino acid of Q, e.g., amino acid at position 29. In some embodiments, the amino acid sequence of SEQ ID NOs: 1610, 1611, 1613, 1614 and 1643 is bound to amino acid 29 of the peptide through a peptide bond. In some specific embodiments, the amino acid at position 29 of the glucagon related peptide (e.g. a Class 1, 2, 3, 4 or 5 glucagon related peptide) is a Gly and the Gly is fused to one of the amino acid sequences of SEQ ID NOs: 1610, 1611, 1613, 1614 and 1643.

[0391] Polymer Heterologous Moiety

[0392] In some embodiments, the heterologous moiety conjugated to Q is a polymer. In some embodiments, the polymer is selected from the group consisting of: polyamides, polycarbonates, polyalkylenes and derivatives thereof including, polyalkylene glycols, polyalkylene oxides, polyalkylene terepthalates, polymers of acrylic and methacrylic esters, including poly(methyl methacrylate), poly(ethyl methacrylate), poly(butylmethacrylate), poly(isobutyl methacrylate), poly(hexylmethacrylate), poly(isodecyl methacrylate), poly(lauryl methacrylate), poly(phenyl methacrylate), poly(methyl acrylate), poly(isopropyl acrylate), poly(isobutyl acrylate), and poly(octadecyl acrylate), polyvinyl polymers including polyvinyl alcohols, polyvinyl ethers, polyvinyl esters, polyvinyl halides, poly(vinyl acetate), and polyvinylpyrrolidone, polyglycolides, polysiloxanes, polyurethanes and co-polymers thereof, celluloses including alkyl cellulose, hydroxyalkyl celluloses, cellulose ethers, cellulose esters, nitro celluloses, methyl cellulose, ethyl cellulose, hydroxypropyl cellulose, hydroxy-propyl methyl cellulose, hydroxybutyl methyl cellulose, cellulose acetate, cellulose propionate, cellulose acetate butyrate, cellulose acetate phthalate, carboxylethyl cellulose, cellulose triacetate, and cellulose sulphate sodium salt, polypropylene, polyethylenes including poly(ethylene glycol), poly(ethylene oxide), and poly(ethylene terephthalate), and polystyrene.

[0393] In some aspects, the polymer is a biodegradable polymer, including a synthetic biodegradable polymer (e.g., polymers of lactic acid and glycolic acid, polyanhydrides, poly(ortho)esters, polyurethanes, poly(butic acid), poly(valeric acid), and poly(lactide-cocaprolactone)), and a natural biodegradable polymer (e.g., alginate and other polysaccharides including dextran and cellulose, collagen, chemical derivatives thereof (substitutions, additions of chemical groups, for example, alkyl, alkylene, hydroxylations, oxidations, and other modifications routinely made by those skilled in the art), albumin and other hydrophilic proteins (e.g., zein and other prolamines and hydrophobic proteins)), as well as any copolymer or mixture thereof. In general, these materials degrade either by enzymatic hydrolysis or exposure to water in vivo, by surface or bulk erosion.

[0394] In some aspects, the polymer is a bioadhesive polymer, such as a bioerodible hydrogel described by H. S. Sawhney, C. P. Pathak and J. A. Hubbell in Macromolecules, 1993, 26, 581-587, the teachings of which are incorporated herein, polyhyaluronic acids, casein, gelatin, glutin, polyanhydrides, polyacrylic acid, alginate, chitosan, poly(methyl methacrylates), poly(ethyl methacrylates), poly(butylmethacrylate), poly(isobutyl methacrylate), poly(hexylmethacrylate), poly(isodecyl methacrylate), poly(lauryl methacrylate), poly(phenyl methacrylate), poly(methyl acrylate), poly(isopropyl acrylate), poly(isobutyl acrylate), and poly(octadecyl acrylate).

[0395] In some embodiments, the polymer is a water-soluble polymer or a hydrophilic polymer. Hydrophilic polymers are further described herein under “Hydrophilic Heterologous Moieties.” Suitable water-soluble polymers are known in the art and include, for example, polyvinylpyrrolidone, hydroxypropyl cellulose (HPC; Klucel), hydroxypropyl methylcellulose (HPMC; Methocel), nitrocellulose, hydroxypropyl ethylcellulose, hydroxypropyl butylcellulose, hydroxypropyl pentylcellulose, methyl cellulose, ethylcellulose (Ethocel), hydroxyethyl cellulose, various alkyl celluloses and hydroxyalkyl celluloses, various cellulose ethers, cellulose acetate, carboxymethyl cellulose, sodium carboxymethyl cellulose, calcium carboxymethyl cellulose, vinyl acetate/crotonic acid copolymers, poly-hydroxyalkyl methacrylate, hydroxymethyl methacrylate, methacrylic acid copolymers, polymethacrylic acid, polymethylmethacrylate, maleic anhydride/methyl vinyl ether copolymers, poly vinyl alcohol, sodium and calcium polyacrylic acid, polyacrylic acid, acidic carboxy polymers, carboxypolymethylene, carboxyvinyl polymers, polyoxyethylene polyoxypropylene copolymer, polymethylvinylether co-maleic anhydride, carboxymethylamide, potassium methacrylate divinylbenzene co-polymer, polyoxyethyleneglycols, polyethylene oxide, and derivatives, salts, and combinations thereof.

[0396] In specific embodiments, the polymer is a polyalkylene glycol, including, for example, polyethylene glycol (PEG).

[0397] In some embodiments, the heterologous moiety is a carbohydrate. In some embodiments, the carbohydrate is a monosaccharide (e.g., glucose, galactose, fructose), a disaccharide (e.g., sucrose, lactose, maltose), an oligosaccharide (e.g., raffinose, stachyose), a polysaccharide (a starch, amylase, amylopectin, cellulose, chitin, callose, laminarin, xylan, mannan, fucoidan, galactomannan.

[0398] In some embodiments, the heterologous moiety is a lipid. The lipid, in some embodiments, is a fatty acid, eicosanoid, prostaglandin, leukotriene, thromboxane, N-acyl ethanolamine), glycerolipid (e.g., mono-, di-, tri-substituted glycerols), glycerophospholipid (e.g., phosphatidylcholine, phosphatidylinositol, phosphatidylethanolamine, phosphatidylserine), sphingolipid (e.g., sphingosine, ceramide), sterol lipid (e.g., steroid, cholesterol), prenol lipid, saccharolipid, or a polyketide, oil, wax, cholesterol, sterol, fat-soluble vitamin, monoglyceride, diglyceride, triglyceride, a phospholipid.

[0399] Fc Fusion Heterologous Moiety

[0400] As noted above, in some embodiments Q is conjugated, e.g., fused to an immunoglobulin or portion thereof (e.g. variable region, CDR, or Fc region). As described herein, Q can be a glucagon superfamily peptide, glucagon related peptide, including a Class 1, 2, 3, 4 or 5 glucagon related peptide, or osteocalcin, calcitonin, amylin, or an analog, derivative or conjugate thereof. Known types of immunoglobulins (Ig) include IgG, IgA, IgE, IgD or IgM. The Fc region is a C-terminal region of an Ig heavy chain, which is responsible for binding to Fc receptors that carry out activities such as recycling (which results in prolonged half-life), antibody dependent cell-mediated cytotoxicity (ADCC), and complement dependent cytotoxicity (CDC).

[0401] For example, according to some definitions the human IgG heavy chain Fc region stretches from Cys226 to the C-terminus of the heavy chain. The “hinge region” generally extends from Glu216 to Pro230 of human IgG1 (hinge regions of other IgG isotypes may be aligned with the IgG1 sequence by aligning the cysteines involved in cysteine bonding). The Fc region of an IgG includes two constant domains, CH2 and CH3. The CH2 domain of a human IgG Fc region usually extends from amino acids 231 to amino acid 341. The CH3 domain of a human IgG Fc region usually extends from amino acids 342 to 447. References made to amino acid numbering of immunoglobulins or immunoglobulin fragments, or regions, are all based on Kabat et al. 1991, Sequences of Proteins of Immunological Interest, U.S. Department of Public Health, Bethesda, Md. In a related embodiment, the Fc region may comprise one or more native or modified constant regions from an immunoglobulin heavy chain, other than CH1, for example, the CH2 and CH3 regions of IgG and IgA, or the CH3 and CH4 regions of IgE.

[0402] Suitable conjugate moieties include portions of immunoglobulin sequence that include the FcRn binding site. FcRn, a salvage receptor, is responsible for recycling immunoglobulins and returning them to circulation in blood. The region of the Fc portion of IgG that binds to the FcRn receptor has been described based on X-ray crystallography (Burmeister et al. 1994, Nature 372:379). The major contact area of the Fc with the FcRn is near the junction of the CH2 and CH3 domains. Fc-FcRn contacts are all within a single Ig heavy chain. The major contact sites include amino acid residues 248, 250-257, 272, 285, 288, 290-291, 308-311, and 314 of the CH2 domain and amino acid residues 385-387, 428, and 433-436 of the CH3 domain.

[0403] Some conjugate moieties may or may not include FcγR binding site(s). FcγR are responsible for ADCC and CDC. Examples of positions within the Fc region that make a direct contact with FcγR are amino acids 234-239 (lower hinge region), amino acids 265-269 (B/C loop), amino acids 297-299 (C′/E loop), and amino acids 327-332 (F/G) loop (Sondermann et al., Nature 406: 267-273, 2000). The lower hinge region of IgE has also been implicated in the FcRI binding (Henry, et al., Biochemistry 36, 15568-15578, 1997). Residues involved in IgA receptor binding are described in Lewis et al., (J. Immunol. 175:6694-701, 2005) Amino acid residues involved in IgE receptor binding are described in Sayers et al. (J Biol. Chem. 279(34):35320-5, 2004).

[0404] Amino acid modifications may be made to the Fc region of an immunoglobulin. Such variant Fc regions comprise at least one amino acid modification in the CH3 domain of the Fc region (residues 342-447) and/or at least one amino acid modification in the CH2 domain of the Fc region (residues 231-341). Mutations believed to impart an increased affinity for FcRn include T256A, T307A, E380A, and N434A (Shields et al. 2001, J. Biol. Chem. 276:6591). Other mutations may reduce binding of the Fc region to FcγRI, FcγRIIA, FcγRIIB, and/or FcγRIIIA without significantly reducing affinity for FcRn. For example, substitution of the Asn at position 297 of the Fc region with Ala or another amino acid removes a highly conserved N-glycosylation site and may result in reduced immunogenicity with concomitant prolonged half-life of the Fc region, as well as reduced binding to FcγRs (Routledge et al. 1995, Transplantation 60:847; Friend et al. 1999, Transplantation 68:1632; Shields et al. 1995, J. Biol. Chem. 276:6591) Amino acid modifications at positions 233-236 of IgG1 have been made that reduce binding to FcγRs (Ward and Ghetie 1995, Therapeutic Immunology 2:77 and Armour et al. 1999, Eur. J. Immunol. 29:2613). Some exemplary amino acid substitutions are described in U.S. Pat. Nos. 7,355,008 and 7,381,408, each incorporated by reference herein in its entirety.

[0405] Hydrophilic Heterologous Moiety

[0406] In some embodiments, Q described herein is covalently bonded to a hydrophilic moiety. As described herein, Q can be a glucagon superfamily peptide, glucagon related peptide, including a Class 1, 2, 3, 4 or 5 glucagon related peptide, or osteocalcin, calcitonin, amylin, or an analog, derivative or conjugate thereof. Hydrophilic moieties can be attached to Q under any suitable conditions used to react a protein with an activated polymer molecule. Any means known in the art can be used, including via acylation, reductive alkylation, Michael addition, thiol alkylation or other chemoselective conjugation/ligation methods through a reactive group on the PEG moiety (e.g., an aldehyde, amino, ester, thiol, α-haloacetyl, maleimido or hydrazino group) to a reactive group on the target compound (e.g., an aldehyde, amino, ester, thiol, α-haloacetyl, maleimido or hydrazino group). Activating groups which can be used to link the water soluble polymer to one or more proteins include without limitation sulfone, maleimide, sulfhydryl, thiol, triflate, tresylate, azidirine, oxirane, 5-pyridyl, and alpha-halogenated acyl group (e.g., alpha-iodo acetic acid, alpha-bromoacetic acid, alpha-chloroacetic acid). If attached to the peptide by reductive alkylation, the polymer selected should have a single reactive aldehyde so that the degree of polymerization is controlled. See, for example, Kinstler et al., Adv. Drug. Delivery Rev. 54: 477-485 (2002); Roberts et al., Adv. Drug Delivery Rev. 54: 459-476 (2002); and Zalipsky et al., Adv. Drug Delivery Rev. 16: 157-182 (1995).

[0407] Further activating groups which can be used to link the hydrophilic moiety (water soluble polymer) to a protein include an alpha-halogenated acyl group (e.g., alpha-iodo acetic acid, alpha-bromoacetic acid, alpha-chloroacetic acid). In specific aspects, an amino acid residue of the peptide having a thiol is modified with a hydrophilic moiety such as PEG. In some embodiments, an amino acid on Q comprising a thiol is modified with maleimide-activated PEG in a Michael addition reaction to result in a PEGylated peptide comprising the thioether linkage shown below:

[chemical structure]

[0408] In some embodiments, the thiol of an amino acid of Q is modified with a haloacetyl-activated PEG in a nucleophilic substitution reaction to result in a PEGylated peptide comprising the thioether linkage shown below:

[chemical structure]

[0409] Suitable hydrophilic moieties include polyethylene glycol (PEG), polypropylene glycol, polyoxyethylated polyols (e.g., POG), polyoxyethylated sorbitol, polyoxyethylated glucose, polyoxyethylated glycerol (POG), polyoxyalkylenes, polyethylene glycol propionaldehyde, copolymers of ethylene glycol/propylene glycol, monomethoxy-polyethylene glycol, mono-(C1-C10) alkoxy- or aryloxy-polyethylene glycol, carboxymethylcellulose, polyacetals, polyvinyl alcohol (PVA), polyvinyl pyrrolidone, poly-1,3-dioxolane, poly-1,3,6-trioxane, ethylene/maleic anhydride copolymer, poly (.beta-amino acids) (either homopolymers or random copolymers), poly(n-vinyl pyrrolidone)polyethylene glycol, propropylene glycol homopolymers (PPG) and other polyakylene oxides, polypropylene oxide/ethylene oxide copolymers, colonic acids or other polysaccharide polymers, Ficoll or dextran and mixtures thereof. Dextrans are polysaccharide polymers of glucose subunits, predominantly linked by α1-6 linkages. Dextran is available in many molecular weight ranges, e.g., about 1 kD to about 100 kD, or from about 5, 10, 15 or 20 kD to about 20, 30, 40, 50, 60, 70, 80 or 90 kD.

[0410] The hydrophilic moiety, e.g., polyethylene glycol chain, in accordance with some embodiments has a molecular weight selected from the range of about 500 to about 40,000 Daltons. In some embodiments the polyethylene glycol chain has a molecular weight selected from the range of about 500 to about 5,000 Daltons, or about 1,000 to about 5,000 Daltons. In another embodiment the hydrophilic moiety, e.g., polyethylene glycol chain, has a molecular weight of about 10,000 to about 20,000 Daltons. In yet other exemplary embodiments the hydrophilic moiety, e.g. polyethylene glycol chain, has a molecular weight of about 20,000 to about 40,000 Daltons.

[0411] Linear or branched hydrophilic polymers are contemplated. Resulting preparations of conjugates may be essentially monodisperse or polydisperse, and may have about 0.5, 0.7, 1, 1.2, 1.5 or 2 polymer moieties per peptide.

[0412] In some embodiments, the native amino acid of the peptide is substituted with an amino acid having a side chain suitable for crosslinking with hydrophilic moieties, to facilitate linkage of the hydrophilic moiety to the peptide. Exemplary amino acids include Cys, Lys, Orn, homo-Cys, or acetyl phenylalanine (Ac-Phe). In other embodiments, an amino acid modified to comprise a hydrophilic group is added to the peptide at the C-terminus

[0413] In some embodiments, the peptide of the conjugate is conjugated to a hydrophilic moiety, e.g. PEG, via covalent linkage between a side chain of an amino acid of the peptide and the hydrophilic moiety. In some embodiments, where Q is a Class 1, 2, 3, 4 or 5 glucagon-related peptide, the peptide is conjugated to a hydrophilic moiety via the side chain of an amino acid at position 16, 17, 21, 24, 29, 40, a position within a C-terminal extension, or the C-terminal amino acid, or a combination of these positions. In some aspects, the amino acid covalently linked to a hydrophilic moiety (e.g., the amino acid comprising a hydrophilic moiety) is a Cys, Lys, Orn, homo-Cys, or Ac-Phe, and the side chain of the amino acid is covalently bonded to a hydrophilic moiety (e.g., PEG).

[0414] rPEG Heterologous Moiety

[0415] In some embodiments, the conjugate of the invention comprises a Q fused to an accessory peptide which is capable of forming an extended conformation similar to chemical PEG (e.g., a recombinant PEG (rPEG) molecule), such as those described in International Patent Application Publication No. WO2009/023270 and U.S. Patent Application Publication No. US2008/0286808. The rPEG molecule is not polyethylene glycol. The rPEG molecule in some aspects is a polypeptide comprising one or more of glycine, serine, glutamic acid, aspartic acid, alanine, or proline. In some aspects, the rPEG is a homopolymer, e.g., poly-glycine, poly-serine, poly-glutamic acid, poly-aspartic acid, poly-alanine, or poly-proline. In other embodiments, the rPEG comprises two types of amino acids repeated, e.g., poly(Gly-Ser), poly(Gly-Glu), poly(Gly-Ala), poly(Gly-Asp), poly(Gly-Pro), poly(Ser-Glu), etc. In some aspects, the rPEG comprises three different types of amino acids, e.g., poly(Gly-Ser-Glu). In specific aspects, the rPEG increases the half-life of Q. In some aspects, the rPEG comprises a net positive or net negative charge. The rPEG in some aspects lacks secondary structure. In some embodiments, the rPEG is greater than or equal to 10 amino acids in length and in some embodiments is about 40 to about 50 amino acids in length. The accessory peptide in some aspects is fused to the N- or C-terminus of the peptide of the invention through a peptide bond or a proteinase cleavage site, or is inserted into the loops of the peptide of the invention. The rPEG in some aspects comprises an affinity tag or is linked to a PEG that is greater than 5 kDa. In some embodiments, the rPEG confers the conjugate of the invention with an increased hydrodynamic radius, serum half-life, protease resistance, or solubility and in some aspects confers the conjugate with decreased immunogenicity.

[0416] Q can be linked to conjugate moieties via direct covalent linkage by reacting targeted amino acid residues of the peptide with an organic derivatizing agent that is capable of reacting with selected side chains or the N- or C-terminal residues of these targeted amino acids. Reactive groups on the peptide or conjugate moiety include, e.g., an aldehyde, amino, ester, thiol, α-haloacetyl, maleimido or hydrazino group. Derivatizing agents include, for example, maleimidobenzoyl sulfosuccinimide ester (conjugation through cysteine residues), N-hydroxysuccinimide

[0417] (through lysine residues), glutaraldehyde, succinic anhydride or other agents known in the art. Alternatively, the conjugate moieties can be linked to the peptide indirectly through intermediate carriers, such as polysaccharide or polypeptide carriers. Examples of polysaccharide carriers include aminodextran. Examples of suitable polypeptide carriers include polylysine, polyglutamic acid, polyaspartic acid, co-polymers thereof, and mixed polymers of these amino acids and others, e.g., serines, to confer desirable solubility properties on the resultant loaded carrier.

### Multimers

[0418] With regard to the Class 1, Class 2, and Class 3 glucagon related peptides, Q may be part of a dimer, trimer or higher order multimer comprising at least two, three, or more peptides bound via a linker, wherein at least one or both peptides is a glucagon related peptide. The dimer may be a homodimer or heterodimer. In some embodiments, the linker is selected from the group consisting of a bifunctional thiol crosslinker and a bi-functional amine crosslinker. In certain embodiments, the linker is PEG, e.g., a 5 kDa PEG, 20 kDa PEG. In some embodiments, the linker is a disulfide bond. For example, each monomer of the dimer may comprise a Cys residue (e.g., a terminal or internally positioned Cys) and the sulfur atom of each Cys residue participates in the formation of the disulfide bond. In some aspects of the invention, the monomers are connected via terminal amino acids (e.g., N-terminal or C-terminal), via internal amino acids, or via a terminal amino acid of at least one monomer and an internal amino acid of at least one other monomer. In specific aspects, the monomers are not connected via an N-terminal amino acid. In some aspects, the monomers of the multimer are attached together in a “tail-to-tail” orientation in which the C-terminal amino acids of each monomer are attached together. A conjugate moiety may be covalently linked to any of the glucagon related peptides described herein, including a dimer, trimer or higher order multimer.

### Conjugation of the Heterologous Moiety to Q

[0419] The heterologous moiety is conjugated to peptide (Q) according to linkage and conjugation methods described in the “Linking Group” section and “Chemical Modification of Q and/or Y subsection.”

### Methods for Making Q

[0420] The peptides (Q) disclosed herein may be prepared by standard synthetic methods, recombinant DNA techniques, or any other methods of preparing peptides and fusion proteins. Although certain non-natural amino acids cannot be expressed by standard recombinant DNA techniques, techniques for their preparation are known in the art. Compounds of this invention that encompass non-peptide portions may be synthesized by standard organic chemistry reactions, in addition to standard peptide chemistry reactions when applicable.

[0421] The peptides of the disclosure can be obtained by methods known in the art. Suitable methods of de novo synthesizing peptides are described in, for example, Chan et al., Fmoc Solid Phase Peptide Synthesis, Oxford University Press, Oxford, United Kingdom, 2005; Peptide and Protein Drug Analysis, ed. Reid, R., Marcel Dekker, Inc., 2000; Epitope Mapping, ed. Westwood et al., Oxford University Press, Oxford, United Kingdom, 2000; and U.S. Pat. No. 5,449,752.

[0422] Also, in the instances in which the peptides of the disclosure do not comprise any non-coded or non-natural amino acids, the peptide can be recombinantly produced using a nucleic acid encoding the amino acid sequence of the peptide using standard recombinant methods. See, for instance, Sambrook et al., Molecular Cloning: A Laboratory Manual. 3rd ed., Cold Spring Harbor Press, Cold Spring Harbor, N.Y. 2001; and Ausubel et al., Current Protocols in Molecular Biology, Greene Publishing Associates and John Wiley & Sons, NY, 1994.

[0423] In some embodiments, the peptides of the disclosure are isolated. In some embodiments, the peptides of the disclosure are purified. It is recognized that “purity” is a relative term, and not to be necessarily construed as absolute purity or absolute enrichment or absolute selection. In some aspects, the purity is at least or about 50%, is at least or about 60%, at least or about 70%, at least or about 80%, or at least or about 90% (e.g., at least or about 91%, at least or about 92%, at least or about 93%, at least or about 94%, at least or about 95%, at least or about 96%, at least or about 97%, at least or about 98%, at least or about 99% or is approximately 100%.

[0424] In some embodiments, the peptides described herein are commercially synthesized by companies, such as Synpep (Dublin, Calif.), Peptide Technologies Corp. (Gaithersburg, Md.), and Multiple Peptide Systems (San Diego, Calif.). In this respect, the peptides can be synthetic, recombinant, isolated, and/or purified.

[0425] Classes of glucagon related peptides (Q) are described in detail below. With respect to each of the sections of disclosure concerning Class 1, Class 2, Class 3, Class 4, and Class 5 glucagon related peptides, modifications are described with respect to the glucagon related peptide portion (Q) of a Q-L-Y conjugate detailed above. Thus, structural elements described with regard to a class of glucagon related peptides are structural elements of Q which is then further modified to generate the Q-L-Y conjugate as described above.

### Class 1 Glucagon Related Peptides

[0426] In certain embodiments, the glucagon related peptide is a Class 1 glucagon related peptide, which is described herein and in International Patent Publication No. WO 2009/155257 (published on Dec. 23, 2009), International Patent Application Publication No. WO 2008/086086 (published on Jul. 17, 2008), and International Patent Application Publication No. WO 2007/056362 (published on May 18, 2007), the contents of which are incorporated by reference in their entirety.

[0427] The biological sequences referenced in the following section (SEQ ID NOs: 801-915) relating to Class 1 glucagon related peptides correspond to SEQ ID NOs: 1-115 in International International Patent Publication No. WO 2009/155257.

### Activity

[0428] Class 1 glucagon peptides retain glucagon receptor activity relative to the native glucagon peptide (SEQ ID NO: 801). For example, the glucagon peptide can retain at least 10%, 20%, 30%, 40%, 50%, 60%, 70%, 75% activity, 80% activity, 85% activity, or 90% of the activity of native glucagon (calculated as the inverse ratio of EC₅₀s for the glucagon peptide vs. glucagon, e.g., as measured by cAMP production using the assay generally described in Example 2). In some embodiments, the Class 1 glucagon related peptides have the same or greater activity (used synonymously with the term “potency” herein) than glucagon. In some embodiments, the glucagon peptides described herein exhibit no more than about 100%, 1000%, 10,000%, 100,000%, or 1,000,000% of the activity of native glucagon peptide.

[0429] Any of the Class 1 glucagon related peptides described herein may exhibit an EC₅₀ at the human glucagon receptor of about 100 nM, 75 nM, 50 nM, 40 nM, 30 nM, 20 nM, 10 nM, 5 nM, 1 nM or less when tested for cAMP induction in HEK293 cells over-expressing glucagon receptor, e.g. using the assay of Example 2. Typically pegylated peptides will exhibit a higher EC₅₀ compared to the unpegylated peptide. For example, the Class 1 glucagon related peptides described herein, when unpegylated, may exhibit activity at the glucagon receptor which is at least 20% (e.g., at least 30%, at least 40%, at least 50%, at least 60%, at least 75%, at least 80%, at least 90% at least 95%, at least 98%, at least 99%, 100%, 150%, 200%, 400%, 500% or more) of the activity of native glucagon (SEQ ID NO: 801) at the glucagon receptor. In certain embodiments, the Class 1 glucagon related peptides described herein exhibit the indicated % activity of native glucagon at the glucagon receptor, when lacking a hydrophilic moiety, but exhibit a decreased % activity of native glucagon at the glucagon receptor, when comprising a hydrophilic moiety. For example, the Class 1 glucagon related peptides described herein, when pegylated, may exhibit activity at the glucagon receptor which is at least 2% (e.g. at least 3%, at least 4%, at least 5%, at least 6%, at least 7%, at least 8%, at least 9%, or at least 10% of the activity of native glucagon. In some embodiments, the Class 1 glucagon related peptides described herein may exhibit any of the above indicated activities but no more than 1000%, 10,000%, 100,000%, or 1,000,000% of the activity of native glucagon at the glucagon receptor.

[0430] In some embodiments, the Class 1 glucagon related peptides exhibit less than about 5%, 4%, 3%, 2% or 1% of the activity of native GLP-1 at the GLP-1 receptor and/or a greater than about 5-fold, 10-fold, or 15-fold selectivity for glucagon receptor compared to GLP-1 receptor. For example, in some embodiments, the Class 1 glucagon related peptides exhibit less than 5% of the activity of native GLP-1 at the GLP-1 receptor and exhibit a greater than 5-fold selectivity for glucagon receptor compared to GLP-1 receptor.

### Improved Solubility

[0431] Native glucagon exhibits poor solubility in aqueous solution, particularly at physiological pH, with a tendency to aggregate and precipitate over time. In contrast, the Class 1 glucagon related peptides in some embodiments exhibit at least 2-fold, 5-fold, or even higher solubility compared to native glucagon at a pH between 6 and 8, or between 6 and 9, for example, at pH 7 after 24 hours at 25° C.

[0432] Accordingly, in some embodiments, a Class 1 glucagon related peptide has been modified relative to the wild type peptide of His-Ser-Gln-Gly-Thr-Phe-Thr-Ser-Asp-Tyr-Ser-Lys-Tyr-Leu-Asp-Ser-Arg-Arg-Ala-Gln-Asp-Phe-Val-Gln-Trp-Leu-Met-Asn-Thr (SEQ ID NO: 801) to improve the peptides solubility in aqueous solutions, particularly at a pH ranging from about 5.5 to about 8.0, while retaining the native peptide's biological activity.

[0433] For example, the solubility of any of the Class 1 glucagon related peptides described herein can be further improved by attaching a hydrophilic moiety to the peptide. Introduction of such groups also increases duration of action, e.g. as measured by a prolonged half-life in circulation. Hydrophilic moieties are further described herein.

Modification with Charged Residues

[0434] In some embodiments, solubility is improved by adding charge to the Class 1 glucagon related peptide by the substitution of native non-charged amino acids with charged amino acids selected from the group consisting of lysine, arginine, histidine, aspartic acid and glutamic acid, or by the addition of charged amino acids to the amino or carboxy terminus of the peptide.

[0435] In accordance with some embodiments, the Class 1 glucagon related peptide has improved solubility due to the fact that the peptide is modified by amino acid substitutions and/or additions that introduce a charged amino acid into the C-terminal portion of the peptide, and in some embodiments at a position C-terminal to position 27 of SEQ ID NO: 801. Optionally, one, two or three charged amino acids may be introduced within the C-terminal portion, and in some embodiments C-terminal to position 27. In accordance with some embodiments, the native amino acid(s) at positions 28 and/or 29 are substituted with a charged amino acid, and/or one to three charged amino acids are added to the C-terminus of the peptide, e.g. after position 27, 28 or 29. In exemplary embodiments, one, two, three or all of the charged amino acids are negatively charged. In other embodiments, one, two, three or all of the charged amino acids are positively charged.

[0436] In specific exemplary embodiments, the Class 1 glucagon related peptide may comprise any one or two of the following modifications: substitution of N28 with E; substitution of N28 with D; substitution of T29 with D; substitution of T29 with E; insertion of E after position 27, 28 or 29; insertion of D after position 27, 28 or 29. For example, D28E29, E28E29, E29E30, E28E30, D28E30.

[0437] In accordance with one exemplary embodiment, the Class 1 glucagon related peptide comprises an amino acid sequence of SEQ ID NO: 811, or an analog thereof that contains 1 to 3 further amino acid modifications (described herein in reference to glucagon agonists) relative to native glucagon, or a glucagon agonist analog thereof. SEQ ID NO: 811 represents a modified Class 1 glucagon related peptide, wherein the asparagine residue at position 28 of the native protein has been substituted with an aspartic acid. In another exemplary embodiment the Class 1 glucagon related peptide comprises an amino acid sequence of SEQ ID NO: 838, wherein the asparagine residue at position 28 of the native protein has been substituted with glutamic acid. Other exemplary embodiments include Class 1 glucagon related peptides of SEQ ID NOs: 824, 825, 826, 833, 835, 836 and 837.

[0438] Substituting the normally occurring amino acid at position 28 and/or 29 with charged amino acids, and/or the addition of one to two charged amino acids at the carboxy terminus of the Class 1 glucagon related peptide, enhances the solubility and stability of the glucagon peptides in aqueous solutions at physiologically relevant pHs (i.e., a pH of about 6.5 to about 7.5) by at least 5-fold and by as much as 30-fold. Accordingly, Class 1 glucagon peptides of some embodiments retain glucagon activity and exhibit at least 2-fold, 5-fold, 10-fold, 15-fold, 25-fold, 30-fold or greater solubility relative to native glucagon at a given pH between about 5.5 and 8, e.g., pH 7, when measured after 24 hours at 25° C.

[0439] Additional modifications, e.g. conservative substitutions, which modifications are further described herein, may be made to the Class 1 glucagon related peptide that still allow it to retain glucagon activity.

### Improved Stability

[0440] Any of the Class 1 glucagon peptides may additionally exhibit improved stability and/or reduced degradation, for example, retaining at least 95% of the original peptide after 24 hours at 25° C. Any of the Class 1 glucagon related peptides disclosed herein may additionally exhibit improved stability at a pH within the range of 5.5 to 8, for example, retaining at least 75%, 80%, 90%, 95%, 96%, 97%, 98% or 99% of the original peptide after 24 hours at 25° C. In some embodiments, the Class 1 glucagon related peptides of the invention exhibit improved stability, such that at least 75% (e.g., at least 80%, at least 85%, at least 90%, at least 95%, more than 95%, up to 100%) of a concentration of the peptide or less than about 25% (e.g., less than 20%, less than 15%, less than 10%, less than 5%, 4%, 3%, 2%, 1%, down to 0%) of degraded peptide is detectable at 280 nm by an ultraviolet (UV) detector after about 1 or more weeks (e.g., about 2 weeks, about 4 weeks, about 1 month, about two months, about four months, about six months, about eight months, about ten months, about twelve months) in solution at a temperature of at least 20° C. (e.g., 21° C., 22° C., 23° C., 24° C., 25° C., 26° C., at least 27.5° C., at least 30° C., at least 35° C., at least 40° C., at least 50° C.) and less than 100° C., less than 85° C., less than 75° C., or less than 70° C. The Class 1 glucagon related peptides may include additional modifications that alter its pharmaceutical properties, e.g. increased potency, prolonged half-life in circulation, increased shelf-life, reduced precipitation or aggregation, and/or reduced degradation, e.g., reduced occurrence of cleavage or chemical modification after storage.

[0441] In yet further exemplary embodiments, any of the foregoing Class 1 glucagon related peptides can be further modified to improve stability by modifying the amino acid at position 15 of SEQ ID NO: 801 to reduce degradation of the peptide over time, especially in acidic or alkaline buffers. In exemplary embodiments, Asp at position 15 is substituted with a Glu, homo-Glu, cysteic acid, or homo-cysteic acid.

[0442] Alternatively, any of the Class 1 glucagon related peptides described herein can be further modified to improve stability by modifying the amino acid at position 16 of SEQ ID NO: 801. In exemplary embodiments, Ser at position 16 is substituted with Thr or Aib, or any of the amino acids substitutions described herein with regard to Class 1 glucagon related peptides which enhance potency at the glucagon receptor. Such modifications reduce cleavage of the peptide bond between Asp15-Ser16.

[0443] In some embodiments, any of the Class 1 glucagon related peptides described herein can be further modified to reduce degradation at various amino acid positions by modifying any one, two, three, or all four of positions 20, 21, 24, or 27. Exemplary embodiments include substitution of Gln at position 20 with Ser, Thr, Ala or Aib, substitution of Asp at position 21 with Glu, substitution of Gln at position 24 with Ala or Aib, substitution of Met at position 27 with Leu or Nle. Removal or substitution of methionine reduces degradation due to oxidation of the methionine. Removal or substitution of Gln or Asn reduces degradation due to deamidation of Gln or Asn. Removal or substitution of Asp reduces degradation that occurs through dehydration of Asp to form a cyclic succinimide intermediate followed by isomerization to iso-aspartate.

### Enhanced Potency

[0444] In accordance with another embodiment, Class 1 glucagon related peptides are provided that have enhanced potency at the glucagon receptor, wherein the peptides comprise an amino acid modification at position 16 of native glucagon (SEQ ID NO: 801). By way of nonlimiting example, such enhanced potency can be provided by substituting the naturally occurring serine at position 16 with glutamic acid or with another negatively charged amino acid having a side chain with a length of 4 atoms, or alternatively with any one of glutamine, homoglutamic acid, or homocysteic acid, or a charged amino acid having a side chain containing at least one heteroatom, (e.g. N, O, S, P) and with a side chain length of about 4 (or 3-5) atoms. Substitution of serine at position 16 with glutamic acid enhances glucagon activity at least 2-fold, 4-fold, 5-fold and up to 10-fold greater at the glucagon receptor. In some embodiments, the Class 1 glucagon related peptide retains selectivity for the glucagon receptor relative to the GLP-1 receptors, e.g., at least 5-fold, 10-fold, or 15-fold selectivity.

### DPP-IV Resistance

[0445] In some embodiments, the Class 1 glucagon peptides disclosed herein are further modified at position 1 or 2 to reduce susceptibility to cleavage by dipeptidyl peptidase IV. More particularly, in some embodiments, position 1 and/or position 2 of the Class 1 glucagon related peptide is substituted with the DPP-IV resistant amino acid(s) described herein. In some embodiments, position 2 of the analog peptide is substituted with an amino isobutyric acid. In some embodiments, position 2 of the analog peptide is substituted with an amino acid selected from the group consisting of D-serine, D-alanine, glycine, N-methyl serine, and ε-amino butyric acid. In another embodiment, position 2 of the Class 1 glucagon related peptide is substituted with an amino acid selected from the group consisting of D-serine, glycine, and aminoisobutyric acid. In some embodiments, the amino acid at position 2 is not D-serine.

[0446] Reduction in glucagon activity upon modification of the amino acids at position 1 and/or position 2 of the glucagon peptide can be restored by stabilization of the alpha-helix structure in the C-terminal portion of the glucagon peptide (around amino acids 12-29). The alpha helix structure can be stabilized by, e.g., formation of a covalent or non-covalent intramolecular bridge (e.g., a lactam bridge between side chains of amino acids at positions “i” and “i+4”, wherein i is an integer from 12 to 25), substitution and/or insertion of amino acids around positions 12-29 with an alpha helix-stabilizing amino acid (e.g., an α,α-disubstituted amino acid), as further described herein.

### Modifications at Position 3

[0447] Glucagon receptor activity can be reduced by an amino acid modification at position 3 (according to the amino acid numbering of wild type glucagon), e.g. substitution of the naturally occurring glutamine at position 3, with an acidic, basic, or a hydrophobic amino acid. For example substitution at position 3 with glutamic acid, ornithine, or norleucine substantially reduces or destroys glucagon receptor activity.

[0448] Maintained or enhanced activity at the glucagon receptor may be achieved by modifying the Gln at position 3 with a glutamine analog as described herein. For example, glucagon agonists can comprise the amino acid sequence of SEQ ID NO: 863, SEQ ID NO: 869, SEQ ID NO: 870, SEQ ID NO: 871, SEQ ID NO: 872, SEQ ID NO: 873, and SEQ ID NO: 874.

Enhancing GLP-1 Activity with C-Terminal Amides and Esters

[0449] Enhanced activity at the GLP-1 receptor is provided by replacing the carboxylic acid of the C-terminal amino acid with a charge-neutral group, such as an amide or ester. Conversely, retaining the native carboxylic acid at the C-terminus of the peptide maintains the relatively greater selectivity of the Class 1 glucagon related peptide for the glucagon receptor vs. the GLP-1 receptor (e.g., greater than about 5, 6, 7, 8, 9, 10, 11, 12, 13, 14, 15, 16, 17, 18, 19, or 20-fold).

### Further Modifications and Combinations

[0450] Additional modifications may be made to the Class 1 glucagon related peptide which may further increase solubility and/or stability and/or glucagon activity. The Class 1 glucagon related peptide may alternatively comprise other modifications that do not substantially affect solubility or stability, and that do not substantially decrease glucagon activity. In exemplary embodiments, the Class 1 glucagon related peptide may comprise a total of up to 11, or up to 12, or up to 13, or up to 14 amino acid modifications relative to the native glucagon sequence. For example, conservative or non-conservative substitutions, additions or deletions may be carried out at any of positions 2, 5, 7, 10, 11, 12, 13, 14, 17, 18, 19, 20, 21, 24, 27, 28 or 29.

[0451] Exemplary modifications of the Class 1 glucagon related peptide include but are not limited to:

[0452] (a) non-conservative substitutions, conservative substitutions, additions or deletions while retaining at least partial glucagon agonist activity, for example, conservative substitutions at one or more of positions 2, 5, 7, 10, 11, 12, 13, 14, 16, 17, 18, 19, 20, 21, 24, 27, 28 or 29, substitution of Tyr at position 10 with Val or Phe, substitution of Lys at position 12 with Arg, substitution of one or more of these positions with Ala;

[0453] (b) deletion of amino acids at positions 29 and/or 28, and optionally position 27, while retaining at least partial glucagon agonist activity;

[0454] (c) modification of the aspartic acid at position 15, for example, by substitution with glutamic acid, homoglutamic acid, cysteic acid or homocysteic acid, which may reduce degradation; or modification of the serine at position 16, for example, by substitution of threonine, Aib, glutamic acid or with another negatively charged amino acid having a side chain with a length of 4 atoms, or alternatively with any one of glutamine, homoglutamic acid, or homocysteic acid, which likewise may reduce degradation due to cleavage of the Asp15-Ser16 bond;

[0455] (d) addition of a hydrophilic moiety such as the water soluble polymer polyethylene glycol, as described herein, e.g. at position 16, 17, 20, 21, 24, 29, 40 or at the C-terminal amino acid, which may increase solubility and/or half-life;

[0456] (e) modification of the methionine at position 27, for example, by substitution with leucine or norleucine, to reduce oxidative degradation;

[0457] (f) modification of the Gln at position 20 or 24, e.g. by substitution with Ser, Thr, Ala or Aib, to reduce degradation that occurs through deamidation of Gln

[0458] (g) modification of Asp at position 21, e.g. by substitution with Glu, to reduce degradation that occurs through dehydration of Asp to form a cyclic succinimide intermediate followed by isomerization to iso-aspartate;

[0459] (h) modifications at position 1 or 2 as described herein that improve resistance to DPP-IV cleavage, optionally in combination with an intramolecular bridge such as a lactam bridge between positions “i” and “i+4”, wherein i is an integer from 12 to 25, e.g., 12, 16, 20, 24;

[0460] (i) acylating or alkylating the glucagon peptide as described herein, which may increase the activity at the glucagon receptor and/or the GLP-1 receptor, increase half-life in circulation and/or extending the duration of action and/or delaying the onset of action, optionally combined with addition of a hydrophilic moiety, additionally or alternatively, optionally combined with a modification which selectively reduces activity at the GLP-1 peptide, e.g., a modification of the Thr at position 7, such as a substitution of the Thr at position 7 with an amino acid lacking a hydroxyl group, e.g., Abu or Ile; deleting amino acids C-terminal to the amino acid at position 27

[0461] (e.g., deleting one or both of the amino acids at positions 28 and 29, yielding a peptide 27 or 28 amino acids in length);

[0462] (j) C-terminal extensions as described herein;

[0463] (k) homodimerization or heterodimerization as described herein; and combinations of the (a) through (k).

[0464] In some embodiments, exemplary modifications of the Class 1 glucagon related peptide include at least one amino acid modification selected from Group A and one or more amino acid modifications selected from Group B and/or Group C,

wherein Group A is:

[0465] substitution of Asn at position 28 with a charged amino acid;

[0466] substitution of Asn at position 28 with a charged amino acid selected from the group consisting of Lys, Arg, H is, Asp, Glu, cysteic acid, and homocysteic acid;

[0467] substitution at position 28 with Asn, Asp, or Glu;

[0468] substitution at position 28 with Asp; substitution at position 28 with Glu;

[0469] substitution of Thr at position 29 with a charged amino acid;

[0470] substitution of Thr at position 29 with a charged amino acid selected from the group consisting of Lys, Arg, H is, Asp, Glu, cysteic acid, and homocysteic acid;

[0471] substitution at position 29 with Asp, Glu, or Lys;

[0472] substitution at position 29 with Glu;

[0473] insertion of 1-3 charged amino acids after position 29;

[0474] insertion after position 29 of Glu or Lys;

[0475] insertion after position 29 of Gly-Lys or Lys-Lys;

[0476] or combinations thereof;

wherein Group B is:

[0477] substitution of Asp at position 15 with Glu;

[0478] substitution of Ser at position 16 with Thr or Aib;

and wherein Group C is:

[0479] substitution of His at position 1 with a non-native amino acid that reduces susceptibility of the glucagon peptide to cleavage by dipeptidyl peptidase IV (DPP-IV),

[0480] substitution of Ser at position 2 with a non-native amino acid that reduces susceptibility of the glucagon peptide to cleavage by dipeptidyl peptidase IV (DPP-IV),

[0481] substitution of Lys at position 12 with Arg;

[0482] substitution of Gln at position 20 with Ser, Thr, Ala or Aib;

[0483] substitution of Asp at position 21 with Glu;

[0484] substitution of Gln at position 24 with Ser, Thr, Ala or Aib;

[0485] substitution of Met at position 27 with Leu or Nle;

[0486] deletion of amino acids at positions 27-29;

[0487] deletion of amino acids at positions 28-29;

[0488] deletion of the amino acid at positions 29;

[0489] or combinations thereof.

[0490] In exemplary embodiments, Lys at position 12 is substituted with Arg. In other exemplary embodiments amino acids at positions 29 and/or 28, and optionally at position 27, are deleted.

[0491] In some specific embodiments, the glucagon peptide comprises (a) an amino acid modification at position 1 and/or 2 that confers DPP-IV resistance, e.g., substitution with DMIA at position 1, or Aib at position 2, (b) an intramolecular bridge within positions 12-29, e.g. at positions 16 and 20, or one or more substitutions of the amino acids at positions 16, 20, 21, and 24 with an α,α disubstituted amino acid, optionally (c) linked to a hydrophilic moiety such as PEG, e.g., through Cys at position 24, 29 or at the C-terminal amino acid, optionally (d) an amino acid modification at position 27 that substitutes Met with, e.g., Nle, optionally (e) amino acid modifications at positions 20, 21 and 24 that reduce degradation, and optionally (f) linked to SEQ ID NO: 820. When the glucagon peptide is linked to SEQ ID NO: 820, the amino acid at position 29 in certain embodiments is Thr or Gly. In other specific embodiments, the glucagon peptide comprises (a) Asp28Glu29, or Glu28Glu29, or Glu29Glu30, or Glu28Glu30 or Asp28Glu30, and optionally (b) an amino acid modification at position 16 that substitutes Ser with, e.g. Thr or Aib, and optionally (c) an amino acid modification at position 27 that substitutes Met with, e.g., Nle, and optionally (d) amino acid modifications at positions 20, 21 and 24 that reduce degradation. In a specific embodiment, the glucagon peptide is T16, A20, E21, A24, Nle27, D28, E29.

[0492] In some embodiments, the Class 1 glucagon related peptide comprises the amino acid sequence:

[0493] X1-X2-Gln-Gly-Thr-Phe-Thr-Ser-Asp-Tyr-Ser-Lys-Tyr-Leu-Asp-Ser-Arg-Arg-Ala-Gln-Asp-Phe-Val-Gln-Trp-Leu-Met-Z (SEQ ID NO: 839) with 1 to 3 amino acid modifications thereto,

[0494] wherein X1 and/or X2 is a non-native amino acid that reduces susceptibility of (or increases resistance of) the glucagon peptide to cleavage by dipeptidyl peptidase IV (DPP-IV),

[0495] wherein Z is selected from the group consisting of —COOH (the naturally occurring C-terminal carboxylate), -Asn-COOH, Asn-Thr-COOH, and Y—COOH, wherein Y is 1 to 2 amino acids, and

[0496] wherein an intramolecular bridge, preferably a covalent bond, connects the side chains of an amino acid at position i and an amino acid at position i+4, wherein i is 12, 16, 20 or 24.

[0497] In some embodiments, the intramolecular bridge is a lactam bridge. In some embodiments, the amino acids at positions i and i+4 of SEQ ID NO: 839 are Lys and Glu, e.g., Glu16 and Lys20. In some embodiments, X1 is selected from the group consisting of: D-His, N-methyl-His, alpha-methyl-His, imidazole acetic acid, des-amino-His, hydroxyl-His, acetyl-H is, homo-His, and alpha, alpha-dimethyl imidiazole acetic acid (DMIA). In other embodiments, X2 is selected from the group consisting of: D-Ser, D-Ala, Gly, N-methyl-Ser, Val, and alpha, amino isobutyric acid (Aib). In some embodiments, the glucagon peptide is covalently linked to a hydrophilic moiety at any of amino acid positions 16, 17, 20, 21, 24, 29, 40, within a C-terminal extension, or at the C-terminal amino acid. In exemplary embodiments, this hydrophilic moiety is covalently linked to a Lys, Cys, Orn, homocysteine, or acetyl-phenylalanine residue at any of these positions. Exemplary hydrophilic moieties include polyethylene glycol (PEG), for example, of a molecular weight of about 1,000 Daltons to about 40,000 Daltons, or about 20,000 Daltons to about 40,000 Daltons.

[0498] In other embodiments, the Class I glucagon related peptide comprises the amino acid sequence:

[0499] X1-X2-Gln-Gly-Thr-Phe-Thr-Ser-Asp-Tyr-Ser-Lys-Tyr-Leu-Asp-Ser-Arg-Arg-Ala-Gln-Asp-Phe-Val-Gln-Trp-Leu-Met-Z (SEQ ID NO: 839),

[0500] wherein X1 and/or X2 is a non-native amino acid that reduces susceptibility of (or increases resistance of) the glucagon peptide to cleavage by dipeptidyl peptidase IV (DPP-IV),

[0501] wherein one, two, three, four or more of positions 16, 20, 21, and 24 of the glucagon peptide is substituted with an α,α-disubstituted amino acid, and

[0502] wherein Z is selected from the group consisting of —COOH (the naturally occurring C-terminal carboxylate), -Asn-COOH, Asn-Thr-COOH, and Y—COOH, wherein Y is 1 to 2 amino acids.

[0503] Exemplary further amino acid modifications to the foregoing Class 1 glucagon related peptides or analogs include substitution of Thr at position 7 with an amino acid lacking a hydroxyl group, e.g., aminobutyric acid (Abu), Ile, optionally, in combination with substitution or addition of an amino acid comprising a side chain covalently attached (optionally, through a spacer) to an acyl or alkyl group, which acyl or alkyl group is non-native to a naturally-occurring amino acid, substitution of Lys at position 12 with Arg; substitution of Asp at position 15 with Glu; substitution of Ser at position 16 with Thr or Aib; substitution of Gln at position 20 with Ser, Thr, Ala or Aib; substitution of Asp at position 21 with Glu; substitution of Gln at position 24 with Ser, Thr, Ala or Aib; substitution of Met at position 27 with Leu or Nle; substitution of Asn at position 28 with a charged amino acid; substitution of Asn at position 28 with a charged amino acid selected from the group consisting of Lys, Arg, H is, Asp, Glu, cysteic acid, and homocysteic acid; substitution at position 28 with Asn, Asp, or Glu; substitution at position 28 with Asp; substitution at position 28 with Glu; substitution of Thr at position 29 with a charged amino acid; substitution of Thr at position 29 with a charged amino acid selected from the group consisting of Lys, Arg, H is, Asp, Glu, cysteic acid, and homocysteic acid; substitution at position 29 with Asp, Glu, or Lys; substitution at position 29 with Glu; insertion of 1-3 charged amino acids after position 29; insertion at position 30 (i.e., after position 29) of Glu or Lys; optionally with insertion at position 31 of Lys; addition of SEQ ID NO: 820 to the C-terminus, optionally, wherein the amino acid at position 29 is Thr or Gly; substitution or addition of an amino acid covalently attached to a hydrophilic moiety; or a combination thereof.

[0504] Any of the modifications described above in reference to Class 1 glucagon agonists which increase glucagon receptor activity, retain partial glucagon receptor activity, improve solubility, increase stability, or reduce degradation can be applied to Class 1 glucagon peptides individually or in combination. Thus, Class 1 glucagon related peptides can be prepared that retain at least 20% of the activity of native glucagon at the glucagon receptor, and which are soluble at a concentration of at least 1 mg/mL at a pH between 6 and 8 or between 6 and 9, (e.g. pH 7), and optionally retain at least 95% of the original peptide (e.g. 5% or less of the original peptide is degraded or cleaved) after 24 hours at 25° C. Alternatively, high potency Class 1 glucagon peptides can be prepared that exhibit at least about 100%, 125%, 150%, 175%, 200%, 250%, 300%, 350%, 400%, 450%, 500%, 600%, 700%, 800%, 900% or 10-fold or more of the activity of native glucagon at the glucagon receptor, and optionally are soluble at a concentration of at least 1 mg/mL at a pH between 6 and 8 or between 6 and 9, (e.g. pH 7), and optionally retains at least 95% of the original peptide (e.g. 5% or less of the original peptide is degraded or cleaved) after 24 hours at 25° C. In some embodiments, the Class 1 glucagon peptides described herein may exhibit at least any of the above indicated relative levels of activity at the glucagon receptor but no more than 1,000%, 5,000% or 10,000% of the activity of native glucagon at the glucagon receptor.

### Examples of Embodiments of Class 1 Glucagon Related Peptides

[0505] In accordance with some embodiments the native glucagon peptide of SEQ ID NO: 801 is modified by the substitution of the native amino acid at position 28 and/or 29 with a negatively charged amino acid (e.g., aspartic acid or glutamic acid) and optionally the addition of a negatively charged amino acid (e.g., aspartic acid or glutamic acid) to the carboxy terminus of the peptide. In an alternative embodiment the native glucagon peptide of SEQ ID NO: 801 is modified by the substitution of the native amino acid at position 29 with a positively charged amino acid (e.g., lysine, arginine or histidine) and optionally the addition of one or two positively charged amino acid (e.g., lysine, arginine or histidine) on the carboxy terminus of the peptide. In accordance with some embodiments a glucagon analog having improved solubility and stability is provided wherein the analog comprises the amino acid sequence of SEQ ID NO: 834 with the proviso that at least one amino acids at position, 28, or 29 is substituted with an acidic amino acid and/or an additional acidic amino acid is added at the carboxy terminus of SEQ ID NO: 834. In some embodiments the acidic amino acids are independently selected from the group consisting of Asp, Glu, cysteic acid and homocysteic acid.

[0506] In accordance with some embodiments a glucagon agonist having improved solubility and stability is provided wherein the agonist comprises the amino acid sequence of SEQ ID NO: 833, wherein at least one of the amino acids at positions 27, 28 or 29 is substituted with a non-native amino acid residue (i.e. at least one amino acid present at position 27, 28 or 29 of the analog is an acid amino acid different from the amino acid present at the corresponding position in SEQ ID NO: 801). In accordance with some embodiments a glucagon agonist is provided comprising the sequence of SEQ ID NO: 833 with the proviso that when the amino acid at position 28 is asparagine and the amino acid at position 29 is threonine, the peptide further comprises one to two amino acids, independently selected from the group consisting of Lys, Arg, H is, Asp or Glu, added to the carboxy terminus of the glucagon peptide.

[0507] It has been reported that certain positions of the native glucagon peptide can be modified while retaining at least some of the activity of the parent peptide. Accordingly, applicants anticipate that one or more of the amino acids located at positions at positions 2, 5, 7, 10, 11, 12, 13, 14, 16, 17, 18, 19, 20, 21, 24, 27, 28 or 29 of the peptide of SEQ ID NO: 811 can be substituted with an amino acid different from that present in the native glucagon peptide, and still retain the enhanced potency, physiological pH stability and biological activity of the parent glucagon peptide. For example, in accordance with some embodiments the methionine residue present at position 27 of the native peptide is changed to leucine or norleucine to prevent oxidative degradation of the peptide.

[0508] In some embodiments a glucagon analog of SEQ ID NO: 833 is provided wherein 1 to 6 amino acids, selected from positions 1, 2, 5, 7, 10, 11, 12, 13, 14, 16, 17, 18, 19, 20, 21 or 24 of the analog differ from the corresponding amino acid of SEQ ID NO: 801. In accordance with another embodiment a glucagon analog of SEQ ID NO: 833 is provided wherein 1 to 3 amino acids selected from positions 1, 2, 5, 7, 10, 11, 12, 13, 14, 16, 17, 18, 19, 20, 21 or 24 of the analog differ from the corresponding amino acid of SEQ ID NO: 801. In another embodiment, a glucagon analog of SEQ ID NO: 807, SEQ ID NO: 808 or SEQ ID NO: 834 is provided wherein 1 to 2 amino acids selected from positions 1, 2, 5, 7, 10, 11, 12, 13, 14, 16, 17, 18, 19, 20, 21 or 24 of the analog differ from the corresponding amino acid of SEQ ID NO: 801, and in a further embodiment those one to two differing amino acids represent conservative amino acid substitutions relative to the amino acid present in the native sequence (SEQ ID NO: 801). In some embodiments a glucagon peptide of SEQ ID NO: 811 or SEQ ID NO: 813 is provided wherein the glucagon peptide further comprises one, two or three amino acid substitutions at positions selected from positions 2, 5, 7, 10, 11, 12, 13, 14, 16, 17, 18, 19, 20, 21, 24, 27 or 29. In some embodiments the substitutions at positions 2, 5, 7, 10, 11, 12, 13, 14, 16, 17, 18, 19, 20, 27 or 29 are conservative amino acid substitutions.

[0509] In some embodiments a glucagon agonist is provided comprising an analog peptide of SEQ ID NO: 801 wherein the analog differs from SEQ ID NO: 801 by having an amino acid other than serine at position 2 and by having an acidic amino acid substituted for the native amino acid at position 28 or 29 or an acidic amino acid added to the carboxy terminus of the peptide of SEQ ID NO: 801. In some embodiments the acidic amino acid is aspartic acid or glutamic acid. In some embodiments a glucagon analog of SEQ ID NO: 809, SEQ ID NO: 812, SEQ ID NO: 813 or SEQ ID NO: 832 is provided wherein the analog differs from the parent molecule by a substitution at position 2. More particularly, position 2 of the analog peptide is substituted with an amino acid selected from the group consisting of D-serine, alanine, D-alanine, glycine, n-methyl serine and amino isobutyric acid.

[0510] In another embodiment a glucagon agonist is provided comprising an analog peptide of SEQ ID NO: 801 wherein the analog differs from SEQ ID NO: 801 by having an amino acid other than histidine at position 1 and by having an acidic amino acid substituted for the native amino acid at position 28 or 29 or an acidic amino acid added to the carboxy terminus of the peptide of SEQ ID NO: 801. In some embodiments the acidic amino acid is aspartic acid or glutamic acid. In some embodiments a glucagon analog of SEQ ID NO: 809, SEQ ID NO: 812, SEQ ID NO: 813 or SEQ ID NO: 832 is provided wherein the analog differs from the parent molecule by a substitution at position 1. More particularly, position 1 of the analog peptide is substituted with an amino acid selected from the group consisting of DMIA, D-histidine, desaminohistidine, hydroxyl-histidine, acetyl-histidine and homo-histidine.

[0511] In accordance with some embodiments the modified glucagon peptide comprises a sequence selected from the group consisting of SEQ ID NO: 809, SEQ ID NO: 812, SEQ ID NO: 813 and SEQ ID NO: 832. In a further embodiment a glucagon peptide is provided comprising a sequence of SEQ ID NO: 809, SEQ ID NO: 812, SEQ ID NO: 813 or SEQ ID NO: 832 further comprising one to two amino acids, added to the C-terminus of SEQ ID NO: 809, SEQ ID NO: 812, SEQ ID NO: 813 or SEQ ID NO: 832, wherein the additional amino acids are independently selected from the group consisting of Lys, Arg, H is, Asp Glu, cysteic acid or homocysteic acid. In some embodiments the additional amino acids added to the carboxy terminus are selected from the group consisting of Lys, Arg, H is, Asp or Glu or in a further embodiment the additional amino acids are Asp or Glu.

[0512] In another embodiment the glucagon peptide comprises the sequence of SEQ ID NO: 807 or a glucagon agonist analog thereof. In some embodiments the peptide comprising a sequence selected from the group consisting of SEQ ID NO: 808, SEQ ID NO: 810, SEQ ID NO: 811, SEQ ID NO: 812 and SEQ ID NO: 813. In another embodiment the peptide comprising a sequence selected from the group consisting of SEQ ID NO: 808, SEQ ID NO: 810 and SEQ ID NO: 811. In some embodiments the glucagon peptide comprises the sequence of SEQ ID NO: 808, SEQ ID NO: 810 and SEQ ID NO: 811 further comprising an additional amino acid, selected from the group consisting of Asp and Glu, added to the C-terminus of the glucagon peptide. In some embodiments the glucagon peptide comprises the sequence of SEQ ID NO: 811 or SEQ ID NO: 813, and in a further embodiment the glucagon peptide comprises the sequence of SEQ ID NO: 811.

[0513] In accordance with some embodiments a glucagon agonist is provided comprising a modified glucagon peptide selected from the group consisting of:

(SEQ ID NO: 834)
NH₂-His-Ser-Gln-Gly-Thr-Phe-Thr-Ser-Asp-Tyr-Ser-Lys-Tyr-Leu-Xaa-Ser-Arg-Arg-
Ala-Gln-Asp-Phe-Val-Gln-Trp-Leu-Xaa-Xaa-Xaa-R,
(SEQ ID NO: 811)
NH₂-His-Ser-Gln-Gly-Thr-Phe-Thr-Ser-Asp-Tyr-Ser-Lys-Tyr-Leu-Asp-Ser-Arg-Arg-
Ala-Gln-Asp-Phe-Val-Gln-Trp-Leu- Met-Asp-Thr-R
and
(SEQ ID NO: 813)
NH₂-His-Ser-Gln-Gly-Thr-Phe-Thr-Ser-Asp-Tyr-Ser-Xaa-Tyr-Leu-Glu-Ser-Arg-Arg-
Ala-Gln-Asp-Phe-Val-Gln-Trp-Leu-Met-Asp-Thr-R

[0514] wherein Xaa at position 15 is Asp, Glu, cysteic acid, homoglutamic acid or homocysteic acid, the Xaa at position 28 is Asn or an acidic amino acid and the Xaa at position 29 is Thr or an acidic amino acid and R is an acidic amino acid, COOH or CONH₂, with the proviso that an acidic acid residue is present at one of positions 28, 29 or 30. In some embodiments R is COOH, and in another embodiment R is CONH₂.

[0515] The present disclosure also encompasses glucagon fusion peptides wherein a second peptide has been fused to the C-terminus of the glucagon peptide to enhance the stability and solubility of the glucagon peptide. More particularly, the fusion glucagon peptide may comprise a glucagon agonist analog comprising a glucagon peptide NH₂-His-Ser-Gln-Gly-Thr-Phe-Thr-Ser-Asp-Tyr-Ser-Lys-Tyr-Leu-Xaa-Ser-Arg-Arg-Ala-Gln-Asp-Phe-Val-Gln-Trp-Leu-Xaa-Xaa-Xaa-R (SEQ ID NO: 834), wherein R is an acidic amino acid or a bond and an amino acid sequence of SEQ ID NO: 820 (GPSSGAPPPS), SEQ ID NO: 821 (KRNRNNIA) or SEQ ID NO: 822 (KRNR) linked to the carboxy terminal amino acid of the glucagon peptide. In some embodiments the glucagon peptide is selected from the group consisting of SEQ ID NO: 833, SEQ ID NO: 807 or SEQ ID NO: 808 further comprising an amino acid sequence of SEQ ID NO: 820 (GPSSGAPPPS), SEQ ID NO: 821 (KRNRNNIA) or SEQ ID NO: 822 (KRNR) linked to the carboxy terminal amino acid of the glucagon peptide. In some embodiments the glucagon fusion peptide comprises SEQ ID NO: 802, SEQ ID NO: 803, SEQ ID NO: 804, SEQ ID NO: 805 and SEQ ID NO: 806 or a glucagon agonist analog thereof, further comprising an amino acid sequence of SEQ ID NO: 820 (GPSSGAPPPS), SEQ ID NO: 821 (KRNRNNIA) or SEQ ID NO: 822 (KRNR) linked to amino acid 29 of the glucagon peptide. In accordance with some embodiments the fusion peptide further comprises a PEG chain linked to an amino acid at position 16, 17, 21, 24, 29, within a C-terminal extension, or at the C-terminal amino acid, wherein the PEG chain is selected from the range of 500 to 40,000 Daltons. In some embodiments the amino acid sequence of SEQ ID NO: 820 (GPSSGAPPPS), SEQ ID NO: 821 (KRNRNNIA) or SEQ ID NO: 822 (KRNR) is bound to amino acid 29 of the glucagon peptide through a peptide bond. In some embodiments the glucagon peptide portion of the glucagon fusion peptide comprises a sequence selected from the group consisting of SEQ ID NO: 810, SEQ ID NO: 811 and SEQ ID NO: 813. In some embodiments the glucagon peptide portion of the glucagon fusion peptide comprises the sequence of SEQ ID NO: 811 or SEQ ID NO: 813, wherein a PEG chain is linked at position 21, 24, 29, within a C-terminal extension or at the C-terminal amino acid, respectively.

[0516] In another embodiment the glucagon peptide sequence of the fusion peptide comprises the sequence of SEQ ID NO: 811, further comprising an amino acid sequence of SEQ ID NO: 820 (GPSSGAPPPS), SEQ ID NO: 821 (KRNRNNIA) or SEQ ID NO: 822 (KRNR) linked to amino acid 29 of the glucagon peptide. In some embodiments the glucagon fusion peptide comprises a sequence selected from the group consisting of SEQ ID NO: 824, SEQ ID NO: 825 and SEQ ID NO: 826. Typically the fusion peptides of the present invention will have a C-terminal amino acid with the standard carboxylic acid group. However, analogs of those sequences wherein the C-terminal amino acid has an amide substituted for the carboxylic acid are also encompassed as embodiments. In accordance with some embodiments the fusion glucagon peptide comprises a glucagon agonist analog selected from the group consisting of SEQ ID NO: 810, SEQ ID NO: 811 and SEQ ID NO: 813, further comprising an amino acid sequence of SEQ ID NO: 823 (GPSSGAPPPS-CONH₂) linked to amino acid 29 of the glucagon peptide.

[0517] The glucagon agonists of the present invention can be further modified to improve the peptide's solubility and stability in aqueous solutions while retaining the biological activity of the glucagon peptide. In accordance with some embodiments, introduction of hydrophilic groups at one or more positions selected from positions 16, 17, 20, 21, 24 and 29 of the peptide of SEQ ID NO: 811, or a glucagon agonist analog thereof, are anticipated to improve the solubility and stability of the pH stabilize glucagon analog. More particularly, in some embodiments the glucagon peptide of SEQ ID NO: 810, SEQ ID NO: 811, SEQ ID NO: 813, or SEQ ID NO: 832 is modified to comprise one or more hydrophilic groups covalently linked to the side chains of amino acids present at positions 21 and 24 of the glucagon peptide.

[0518] In accordance with some embodiments, the glucagon peptide of SEQ ID NO: 811 is modified to contain one or more amino acid substitution at positions 16, 17, 20, 21, 24 and/or 29, wherein the native amino acid is substituted with an amino acid having a side chain suitable for crosslinking with hydrophilic moieties, including for example, PEG. The native peptide can be substituted with a naturally occurring amino acid or a synthetic (non-naturally occurring) amino acid. Synthetic or non-naturally occurring amino acids refer to amino acids that do not naturally occur in vivo but which, nevertheless, can be incorporated into the peptide structures described herein.

[0519] In some embodiments, a glucagon agonist of SEQ ID NO: 810, SEQ ID NO: 811 or SEQ ID NO: 813 is provided wherein the native glucagon peptide sequence has been modified to contain a naturally occurring or synthetic amino acid in at least one of positions 16, 17, 21, 24, 29, within a C-terminal extension or at the C-terminal amino acid of the native sequence, wherein the amino acid substitute further comprises a hydrophilic moiety. In some embodiments the substitution is at position 21 or 24, and in a further embodiment the hydrophilic moiety is a PEG chain. In some embodiments the glucagon peptide of SEQ ID NO: 811 is substituted with at least one cysteine residue, wherein the side chain of the cysteine residue is further modified with a thiol reactive reagent, including for example, maleimido, vinyl sulfone, 2-pyridylthio, haloalkyl, and haloacyl. These thiol reactive reagents may contain carboxy, keto, hydroxyl, and ether groups as well as other hydrophilic moieties such as polyethylene glycol units. In an alternative embodiment, the native glucagon peptide is substituted with lysine, and the side chain of the substituting lysine residue is further modified using amine reactive reagents such as active esters (succinimido, anhydride, etc) of carboxylic acids or aldehydes of hydrophilic moieties such as polyethylene glycol. In some embodiments the glucagon peptide is selected form the group consisting of SEQ ID NO: 814, SEQ ID NO: 815, SEQ ID NO: 816, SEQ ID NO: 817, SEQ ID NO: 818 and SEQ ID NO: 819.

[0520] In accordance with some embodiments the pegylated glucagon peptide comprises two or more polyethylene glycol chains covalently bound to the glucagon peptide wherein the total molecular weight of the glucagon chains is about 1,000 to about 5,000 Daltons. In some embodiments the pegylated glucagon agonist comprises a peptide of SEQ ID NO: 806, wherein a PEG chain is covalently linked to the amino acid residue at position 21 and at position 24, and wherein the combined molecular weight of the two PEG chains is about 1,000 to about 5,000 Daltons. In another embodiment the pegylated glucagon agonist comprises a peptide of SEQ ID NO: 806, wherein a PEG chain is covalently linked to the amino acid residue at position 21 and at position 24, and wherein the combined molecular weight of the two PEG chains is about 5,000 to about 20,000 Daltons.

[0521] The polyethylene glycol chain may be in the form of a straight chain or it may be branched. In accordance with some embodiments the polyethylene glycol chain has an average molecular weight selected from the range of about 500 to about 40,000 Daltons. In some embodiments the polyethylene glycol chain has a molecular weight selected from the range of about 500 to about 5,000 Daltons. In another embodiment the polyethylene glycol chain has a molecular weight of about 20,000 to about 40,000 Daltons.

[0522] Any of the glucagon peptides described above may be further modified to include a covalent or non-covalent intramolecular bridge or an alpha helix-stabilizing amino acid within the C-terminal portion of the glucagon peptide (amino acid positions 12-29). In accordance with some embodiments, the glucagon peptide comprises any one or more of the modifications discussed above in addition to an amino acid substitution at positions 16, 20, 21, or 24 (or a combination thereof) with an α,α-disubstituted amino acid, e.g., Aib. In accordance with another embodiment, the glucagon peptide comprises any one or more modifications discussed above in addition to an intramolecular bridge, e.g., a lactam, between the side chains of the amino acids at positions 16 and 20 of the glucagon peptide.

[0523] In accordance with some embodiments, the glucagon peptide comprises the amino acid sequence of SEQ ID NO: 877, wherein the Xaa at position 3 is an amino acid comprising a side chain of Structure I, II, or III:

[chemical structure]

wherein R¹ is C₀₋₃ alkyl or C₀₋₃ heteroalkyl; R² is NHR⁴ or C₁₋₃ alkyl; R³ is C₁₋₃ alkyl; R⁴ is H or C₁₋₃ alkyl; X is NH, O, or S; and Y is NHR⁴, SR³, or OR³. In some embodiments, X is NH or Y is NHR⁴. In some embodiments, R¹ is C₀₋₂ alkyl or C₁ heteroalkyl. In some embodiments, R² is NHR⁴ or C₁ alkyl. In some embodiments, R⁴ is H or C¹ alkyl. In exemplary embodiments an amino acid comprising a side chain of Structure I is provided wherein, R¹ is CH₂—S, X is NH, and R² is CH₃ (acetamidomethyl-cysteine, C(Acm)); R¹ is CH₂, X is NH, and R² is CH₃ (acetyldiaminobutanoic acid, Dab(Ac)); R¹ is C₀ alkyl, X is NH, R² is NHR⁴, and R⁴ is H (carbamoyldiaminopropanoic acid, Dap(urea)); or R¹ is CH₂—CH₂, X is NH, and R² is CH₃ (acetylornithine, Orn(Ac)). In exemplary embodiments an amino acid comprising a side chain of Structure II is provided, wherein R¹ is CH₂, Y is NHR⁴, and R⁴ is CH₃ (methylglutamine, Q(Me)); In exemplary embodiments an amino acid comprising a side chain of Structure III is provided wherein, R¹ is CH₂ and R⁴ is H (methionine-sulfoxide, M(O)); In specific embodiments, the amino acid at position 3 is substituted with Dab(Ac). For example, glucagon agonists can comprise the amino acid sequence of SEQ ID NO: 863, SEQ ID NO: 869, SEQ ID NO: 871, SEQ ID NO: 872, SEQ ID NO: 873, and SEQ ID NO: 874.

[0524] In certain embodiments, the glucagon peptide is an analog of the glucagon peptide of SEQ ID NO: 877. In specific aspects, the analog comprises any of the amino acid modifications described herein, including, but not limited to: a substitution of Asn at position 28 with a charged amino acid; a substitution of Asn at position 28 with a charged amino acid selected from the group consisting of Lys, Arg, H is, Asp, Glu, cysteic acid, and homocysteic acid; a substitution at position 28 with Asn, Asp, or Glu; a substitution at position 28 with Asp; a substitution at position 28 with Glu; a substitution of Thr at position 29 with a charged amino acid; a substitution of Thr at position 29 with a charged amino acid selected from the group consisting of Lys, Arg, H is, Asp, Glu, cysteic acid, and homocysteic acid; a substitution at position 29 with Asp, Glu, or Lys; a substitution at position 29 with Glu; a insertion of 1-3 charged amino acids after position 29; an insertion after position 29 of Glu or Lys; an insertion after position 29 of Gly-Lys or Lys-Lys; and a combination thereof.

[0525] In certain embodiments, the analog of the glucagon peptide of SEQ ID NO: 877 comprises an α,α-disubstituted amino acid, such as Aib, at one, two, three, or all of positions 16, 20, 21, and 24.

[0526] In certain embodiments, the analog of the glucagon peptide of SEQ ID NO: 877 comprises one or more of the following: substitution of His at position 1 with a non-native amino acid that reduces susceptibility of the glucagon peptide to cleavage by dipeptidyl peptidase IV (DPP-IV), substitution of Ser at position 2 with a non-native amino acid that reduces susceptibility of the glucagon peptide to cleavage by dipeptidyl peptidase IV (DPP-IV), substitution of Thr at position 7 with an amino acid lacking a hydroxyl group, e.g., Abu or Ile; substitution of Tyr at position 10 with Phe or Val; substitution of Lys at position 12 with Arg; substitution of Asp at position 15 with Glu, substitution of Ser at position 16 with Thr or Aib; substitution of Gln at position 20 with Ala or Aib; substitution of Asp at position 21 with Glu; substitution of Gln at position 24 with Ala or Aib; substitution of Met at position 27 with Leu or Nle; deletion of amino acids at positions 27-29; deletion of amino acids at positions 28-29; deletion of the amino acid at positions 29; addition of the amino acid sequence of SEQ ID NO: 820 to the C-terminus, wherein the amino acid at position 29 is Thr or Gly, or a combination thereof.

[0527] In accordance with specific embodiments, the glucagon peptide comprises the amino acid sequence of any of SEQ ID NOs: 862-867 and 869-874.

[0528] In certain embodiments, the analog of the glucagon peptide comprising SEQ ID NO: 877 comprises a hydrophilic moiety, e.g., PEG, covalently linked to the amino acid at any of positions 16, 17, 20, 21, 24, and 29 or at the C-terminal amino acid.

[0529] In certain embodiments, the analog of the glucagon peptide comprising SEQ ID NO: 877 comprises an amino acid comprising a side chain covalently attached, optionally, through a spacer, to an acyl group or an alkyl group, which acyl group or alkyl group is non-native to a naturally-occurring amino acid. The acyl group in some embodiments is a C4 to C30 fatty acyl group. In other embodiments, the alkyl group is a C₄ to C₃₀ alkyl. In specific aspects, the acyl group or alkyl group is covalently attached to the side chain of the amino acid at position 10. In some embodiments, the amino acid at position 7 is Ile or Abu.

[0530] The glucagon agonist may be a peptide comprising the amino acid sequence of any of the SEQ ID NOs: 801-919, optionally with up to 1, 2, 3, 4, or 5 further modifications that retain glucagon agonist activity. In certain embodiments, the glucagon agonist comprises the amino acids of any of SEQ ID NOs: 859-919.

### Class 2 Glucagon Related Peptides

[0531] In certain embodiments, the glucagon related peptide is a Class 2 glucagon related peptide, which is described herein and in International Patent Publication No. WO 2010/011439, and U.S. Application No. 61/187,578, (filed on Jun. 16, 2009) the contents of which are incorporated by reference in their entirety.

[0532] The biological sequences referenced in the following section (SEQ ID NOs: 1001-1262) relating to Class 2 glucagon related peptides correspond to SEQ ID NOs: 1-262 in International Patent Publication No. WO 2010/011439. SEQ ID NOs: 1263 to 1275 relating to Class 2 glucagon related peptides correspond to SEQ ID NOs: 657 to 669 in U.S. Application No. 61/187,578.

### Activity

[0533] Native glucagon does not activate the GIP receptor, and normally has about 1% of the activity of native-GLP-1 at the GLP-1 receptor. Modifications to the native glucagon sequence described herein produce Class 2 glucagon related peptides that can exhibit potent glucagon activity equivalent to or better than the activity of native glucagon (SEQ ID NO: 1001), potent GIP activity equivalent to or better than the activity of native GIP (SEQ ID NO: 1004), and/or potent GLP-1 activity equivalent to or better than the activity of native GLP-1. In this regard, the Class 2 glucagon related peptide may be one of a glucagon/GIP co-agonist, glucagon/GIP/GLP-1 tri-agonist, GIP/GLP-1 co-agonist, or a GIP agonist glucagon peptide, as further described herein.

[0534] In some embodiments, the Class 2 glucagon related peptides described herein exhibit an EC₅₀ for GIP receptor activation activity of about 100 nM or less, or about 75, 50, 25, 10, 8, 6, 5, 4, 3, 2 or 1 nM or less. In some embodiments, the Class 2 glucagon related peptides exhibit an EC₅₀ for glucagon receptor activation of about 100 nM or less, or about 75, 50, 25, 10, 8, 6, 5, 4, 3, 2 or 1 nM or less. In some embodiments, the Class 2 glucagon related peptides exhibit an EC₅₀ for GLP-1 receptor activation of about 100 nM or less, or about 75, 50, 25, 10, 8, 6, 5, 4, 3, 2 or 1 nM or less. Receptor activation can be measured by in vitro assays measuring cAMP induction in HEK293 cells over-expressing the receptor, e.g. assaying HEK293 cells co-transfected with DNA encoding the receptor and a luciferase gene linked to cAMP responsive element as described in Example 2.

[0535] In some embodiments, Class 2 glucagon related peptides exhibit at least about 0.1%, 0.2%, 0.3%, 0.4%, 0.5%, 0.6%, 0.7%, 0.8%, 0.9%, 1%, 5%, 10%, 20%, 30%, 40%, 50%, 60%, 75%, 100%, 125%, 150%, 175% or 200% or higher activity at the GIP receptor relative to native GIP (GIP potency). In some embodiments, the glucagon peptides described herein exhibit no more than 1000%, 10,000%, 100,000%, or 1,000,000% activity at the GIP receptor relative to native GIP. In some embodiments, Class 2 glucagon related peptides exhibit at least about 1%, 5%, 10%, 20%, 30%, 40%, 50%, 60%, 75%, 100%, 125%, 150%, 175%, 200%, 250%, 300%, 350%, 400%, 450%, or 500% or higher activity at the glucagon receptor relative to native glucagon (glucagon potency). In some embodiments, the glucagon peptides described herein exhibit no more than 1000%, 10,000%, 100,000%, or 1,000,000% activity at the glucagon receptor relative to native glucagon. In some embodiments, Class 2 glucagon related peptides exhibit at least about 0.1%, 0.2%, 0.3%, 0.4%, 0.5%, 0.6%, 0.7%, 0.8%, 0.9%, 1%, 5%, 10%, 20%, 30%, 40%, 50%, 60%, 75%, 100%, 125%, 150%, 175% or 200% or higher activity at the GLP-1 receptor relative to native GLP-1 (GLP-1 potency). In some embodiments, the glucagon peptides described herein exhibit no more than 1000%, 10,000%, 100,000%, or 1,000,000% activity at the GLP-1 receptor relative to native GLP-1. A Class 2 glucagon related peptide's activity at a receptor relative to a native ligand of the receptor is calculated as the inverse ratio of EC₅₀s for the Class 2 glucagon related peptide vs. the native ligand.

[0536] In some embodiments, Class 2 glucagon related peptides exhibit activity at both the glucagon receptor and the GIP receptor (“glucagon/GIP co-agonists”). These Class 2 glucagon related peptides have lost native glucagon's selectivity for glucagon receptor compared to GIP receptor. In some embodiments, the EC₅₀ of the Class 2 glucagon related peptide at the GIP receptor is less than about 50-fold, 40-fold, 30-fold or 20-fold different (higher or lower) from its EC₅₀ at the glucagon receptor. In some embodiments, the GIP potency of the Class 2 glucagon related peptide is less than about 500-, 450-, 400-, 350-, 300-, 250-, 200-, 150-, 100-, 75-, 50-, 25-, 20-, 15-, 10-, or 5-fold different (higher or lower) from its glucagon potency. In some embodiments, the ratio of the EC₅₀ of the Class 2 glucagon related peptide at the GIP receptor divided by the EC₅₀ of the Class 2 glucagon related peptide at the glucagon receptor is less than about 100, 75, 60, 50, 40, 30, 20, 15, 10, or 5. In some embodiments, the ratio of the EC₅₀ at the GIP receptor divided by the EC₅₀ at the glucagon receptor is about 1 or less than about 1 (e.g., about 0.01, 0.013, 0.0167, 0.02, 0.025, 0.03, 0.05, 0.067, 0.1, 0.2). In some embodiments, the ratio of the GIP potency of the Class 2 glucagon related peptide compared to the glucagon potency of the Class 2 glucagon related peptide is less than about 500, 450, 400, 350, 300, 250, 200, 150, 100, 75, 60, 50, 40, 30, 20, 15, 10, or 5. In some embodiments, the ratio of the potency at the GIP receptor divided by the potency at the glucagon receptor is about 1 or less than about 1 (e.g., about 0.01, 0.013, 0.0167, 0.02, 0.025, 0.03, 0.05, 0.067, 0.1, 0.2). In some embodiments, GLP-1 activity have been significantly reduced or destroyed, e.g., by an amino acid modification at position 7, a deletion of the amino acid(s) C-terminal to the amino acid at position 27 or 28, yielding a 27- or 28-amino acid peptide, or a combination thereof.

[0537] In another aspect, Class 2 glucagon related peptides exhibit activity at the glucagon, GIP and GLP-1 receptors (“glucagon/GIP/GLP-1 tri-agonists”). These Class 2 glucagon related peptides have lost native glucagon's selectivity for the glucagon receptor compared to both the GLP-1 and GIP receptors. In some embodiments, the EC₅₀ of the Class 2 glucagon related peptide at the GIP receptor is less than about 50-fold, 40-fold, 30-fold or 20-fold different (higher or lower) from its respective EC₅₀s at the glucagon and GLP-1 receptors. In some embodiments, the GIP potency of the Class 2 glucagon related peptide is less than about 500-, 450-, 400-, 350-, 300-, 250-, 200-, 150-, 100-, 75-, 50-, 25-, 20-, 15-, 10-, or 5-fold different (higher or lower) from its glucagon and GLP-1 potencies. In some embodiments, the ratio of the EC₅₀ of the tri-agonist at the GIP receptor divided by the EC₅₀ of the tri-agonist at the GLP-1 receptor is less than about 100, 75, 60, 50, 40, 30, 20, 15, 10, or 5. In some embodiments, the ratio of the EC₅₀ at the GIP receptor divided by the EC₅₀ at the GLP-1 receptor is about 1 or less than about 1 (e.g., about 0.01, 0.013, 0.0167, 0.02, 0.025, 0.03, 0.05, 0.067, 0.1, 0.2). In some embodiments, the ratio of the GIP potency of the tri-agonist compared to the GLP-1 potency of the tri-agonist is less than about 100, 75, 60, 50, 40, 30, 20, 15, 10, or 5. In some embodiments, the ratio of the potency at the GIP receptor divided by the potency at the GLP-1 receptor is about 1 or less than about 1 (e.g., about 0.01, 0.013, 0.0167, 0.02, 0.025, 0.03, 0.05, 0.067, 0.1, 0.2). In related embodiments, the ratio of the EC₅₀ of the tri-agonist at the GIP receptor divided by the EC₅₀ of the tri-agonist at the glucagon receptor is less than about 100, 75, 60, 50, 40, 30, 20, 15, 10, or 5. In some embodiments, the ratio of the EC₅₀ at the GIP receptor divided by the EC₅₀ at the glucagon receptor is about 1 or less than about 1 (e.g., about 0.01, 0.013, 0.0167, 0.02, 0.025, 0.03, 0.05, 0.067, 0.1, 0.2). In some embodiments, the ratio of the GIP potency of the tri-agonist compared to the glucagon potency of the tri-agonist is less than about 500, 450, 400, 350, 300, 250, 200, 150, 100, 75, 60, 50, 40, 30, 20, 15, 10, or 5. In some embodiments, the ratio of the potency at the GIP receptor divided by the potency at the glucagon receptor is about 1 or less than about 1 (e.g., about 0.01, 0.013, 0.0167, 0.02, 0.025, 0.03, 0.05, 0.067, 0.1, 0.2). In some embodiments, the ratio of the EC₅₀ of the tri-agonist at the GLP-1 receptor divided by the EC₅₀ of the tri-agonist at the glucagon receptor is less than about 100, 75, 60, 50, 40, 30, 20, 15, 10, or 5. In some embodiments, the ratio of the EC₅₀ at the GLP-1 receptor divided by the EC₅₀ at the glucagon receptor is about 1 or less than about 1 (e.g., about 0.01, 0.013, 0.0167, 0.02, 0.025, 0.03, 0.05, 0.067, 0.1, 0.2). In some embodiments, the ratio of the GLP-1 potency of the tri-agonist compared to the glucagon potency of the tri-agonist is less than about 100, 75, 60, 50, 40, 30, 20, 15, 10, or 5. In some embodiments, the ratio of the potency at the GLP-1 receptor divided by the potency at the glucagon receptor is about 1 or less than about 1 (e.g., about 0.01, 0.013, 0.0167, 0.02, 0.025, 0.03, 0.05, 0.067, 0.1, 0.2).

[0538] In yet another aspect, Class 2 glucagon related peptides exhibit activity at the GLP-1 and GIP receptors, but in which the glucagon activity has been significantly reduced or destroyed (“GIP/GLP-1 co-agonists”), e.g., by an amino acid modification at position 3. For example, substitution at this position with an acidic, basic, or a hydrophobic amino acid (glutamic acid, ornithine, norleucine) reduces glucagon activity. In some embodiments, the EC₅₀ of the glucagon peptide at the GIP receptor is less than about 50-fold, 40-fold, 30-fold or 20-fold different (higher or lower) from its EC₅₀ at the GLP-1 receptor. In some embodiments, the GIP potency of the Class 2 glucagon related peptide is less than about 25-, 20-, 15-, 10-, or 5-fold different (higher or lower) from its GLP-1 potency. In some embodiments these Class 2 glucagon related peptides have about 10% or less of the activity of native glucagon at the glucagon receptor, e.g. about 1-10%, or about 0.1-10%, or greater than about 0.1% but less than about 10%. In some embodiments, the ratio of the EC₅₀ of the Class 2 glucagon related peptide at the GIP receptor divided by the EC₅₀ of the Class 2 glucagon related peptide at the GLP-1 receptor is less than about 100, 75, 60, 50, 40, 30, 20, 15, 10, or 5, and no less than 1. In some embodiments, the ratio of the GIP potency of the Class 2 glucagon related peptide compared to the GLP-1 potency of the Class 2 glucagon related peptide is less than about 100, 75, 60, 50, 40, 30, 20, 15, 10, or 5, and no less than 1.

[0539] In a further aspect, Class 2 glucagon related peptides exhibit activity at the GIP receptor, in which the glucagon and GLP-1 activity have been significantly reduced or destroyed (“GIP agonist glucagon peptides”), e.g., by amino acid modifications at positions 3 with Glu and 7 with Ile. In some embodiments, these Class 2 glucagon related peptides have about 10% or less of the activity of native glucagon at the glucagon receptor, e.g. about 1-10%, or about 0.1-10%, or greater than about 0.1%, 0.5%, or 1% but less than about 1%, 5%, or 10%. In some embodiments these Class 2 glucagon related peptides also have about 10% or less of the activity of native GLP-1 at the GLP-1 receptor, e.g. about 1-10%, or about 0.1-10%, or greater than about 0.1%, 0.5%, or 1% but less than about 1%, 5%, or 10%.

[0540] In some embodiments, when the Class 2 glucagon related peptide is not pegylated, the EC₅₀ of the Class 2 glucagon related peptide for GIP receptor activation is about 4, 2, 1 nM or less, or the analog has at least about 1%, 2%, 3%, 4% or 5% of the activity of native GIP at the GIP receptor. In related embodiments, the EC₅₀ of the unpegylated Class 2 glucagon related peptide for GLP-1 receptor activation is about 4, 2, 1 nM or less or has at least about 1%, 2%, 3%, 4% or 5% of the activity of native GLP-1 at the GLP-1 receptor. In yet other related embodiments, the EC₅₀ of the unpegylated Class 2 glucagon related peptide for glucagon receptor activation is about 4, 2, 1 nM or less, or at least about 5%, 10%, 15% or 20% of the activity of native glucagon at the glucagon receptor. In some embodiments, the unpegylated Class 2 glucagon related peptide has less than about 1% of the activity of native glucagon at the glucagon receptor. In other embodiments, the unpegylated Class 2 glucagon related peptide has less than about 10%, 5% or 1% of the activity of native GLP-1 at the GLP-1 receptor.

[0541] In embodiments where the Class 2 glucagon related peptides are linked to hydrophilic moieties such as PEG, the relative EC₅₀s at one or more receptors may be higher e.g., about 10-fold higher. For example, the EC₅₀ of a pegylated analog for GIP receptor activation is about 10 nM or less, or the Class 2 glucagon related peptide has at least about 0.1%, 0.2%, 0.3%, 0.4% or 0.5% of the activity of native GIP at the GIP receptor. In related embodiments, the EC₅₀ of a pegylated Class 2 glucagon related peptide for GLP-1 receptor activation is about 10 nM or less or has at least about 0.1%, 0.2%, 0.3%, 0.4% or 0.5% of the activity of native GLP-1 at the GLP-1 receptor. In yet other related embodiments, the EC₅₀ of a pegylated Class 2 glucagon related peptide for glucagon receptor activation is about 10 nM or less, or at least about 0.5%, 1%, 1.5% or 2% of the activity of native glucagon at the glucagon receptor. In some embodiments, the Class 2 glucagon related peptide has less than about 1% of the activity of native glucagon at the glucagon receptor. In other embodiments, the Class 2 glucagon related peptide has less than about 10%, 5% or 1% of the activity of native GLP-1 at the GLP-1 receptor.

### Modifications

[0542] The modifications disclosed herein in reference to a Class 2 glucagon related peptide permit the manipulation of glucagon (SEQ ID NO: 1001) to create glucagon peptides that exhibit increased GIP activity, glucagon activity, and/or GLP-1 activity. Other modifications disclosed herein in reference to a Class 2 glucagon related peptide prolong the half-life, increase solubility, or increase stability of the resulting peptide. Yet other modifications disclosed herein in reference to a Class 2 glucagon related peptide have no effect on activity, or can be made without destroying the desired activity or activities. Any of the combinations in reference to a Class 2 glucagon related peptide that serve the same purpose (e.g. increasing GIP activity) can be applied individually or in combination. Any of the single or sets of combinations in reference to a Class 2 glucagon related peptide that confer enhanced properties can be applied individually or in combination, e.g. increased GIP and/or GLP-1 activity can be combined with increased half-life. In related embodiments, 1, 2, 3, 4, 5, 6 or more of the amino acid modifications may be non-conservative substitutions, additions or deletions. In some embodiments, 1, 2, 3, 4, 5, 6 or more of the amino acid modifications may be conservative substitutions.

Modifications that Affect GIP Activity

[0543] Enhanced activity at the GIP receptor is provided by an amino acid modification at position 1. For example, His at position 1 is substituted with a large, aromatic amino acid, optionally Tyr, Phe, Trp, amino-Phe, nitro-Phe, chloro-Phe, sulfo-Phe, 4-pyridyl-Ala, methyl-Tyr, or 3-amino Tyr. The combination of Tyr at position 1 with stabilization of the alpha helix within the region corresponding to amino acids 12-29 provided a Class 2 glucagon related peptide that activates the GIP receptor as well as the GLP-1 receptor and the glucagon receptor. The alpha helix structure can be stabilized by, e.g., formation of a covalent or non-covalent intramolecular bridge, or substitution and/or insertion of amino acids around positions 12-29 with an alpha helix-stabilizing amino acid (e.g., an α,α-disubstituted amino acid).

[0544] Enhanced activity at the GIP receptor is also provided by amino acid modifications at positions 27 and/or 28, and optionally at position 29. For example, the Met at position 27 is substituted with a large aliphatic amino acid, optionally Leu, the Asn at position 28 is substituted with a small aliphatic amino acid, optionally Ala, and the Thr at position 29 is substituted with a small aliphatic amino acid, optionally Gly. Substitution with LAG at positions 27-29 provides increased GIP activity relative to the native MNT sequence at those positions.

[0545] Enhanced activity at the GIP receptor is also provided by an amino acid modification at position 12. For example, position 12 is substituted with a large, aliphatic, nonpolar amino acid, optionally Ile.

[0546] Enhanced activity at the GIP receptor is also provided by an amino acid modification at positions 17 and/or 18. For example, position 17 is substituted with a polar residue, optionally Gln, and position 18 is substituted with a small aliphatic amino acid, optionally Ala. A substitution with QA at positions 17 and 18 provides increased GIP activity relative to the native RR sequence at those positions.

[0547] Increased activity at the GIP receptor is provided by modifications that permit formation of an intramolecular bridge between amino acid side chains at positions from 12 to 29. For example, an intramolecular bridge can be formed by a covalent bond between the side chains of two amino acids at positions i and i+4 or between positions j and j+3, or between positions k and k+7. In exemplary embodiments, the bridge is between positions 12 and 16, 16 and 20, 20 and 24, 24 and 28, or 17 and 20. In other embodiments, non-covalent interactions such as salt bridges can be formed between positively and negatively charged amino acids at these positions.

[0548] Any of the modifications described above which increase GIP receptor activity can be applied individually or in combination. Combinations of the modifications that increase GIP receptor activity generally provide higher GIP activity than any of such modifications taken alone.

Modifications that Affect Glucagon Activity

[0549] In some embodiments, enhanced glucagon potency is provided by an amino acid modification at position 16 of native glucagon (SEQ ID NO: 1001). By way of nonlimiting example, such enhanced potency can be provided by substituting the naturally occurring serine at position 16 with glutamic acid or with another negatively charged amino acid having a side chain with a length of 4 atoms, or alternatively with any one of glutamine, homoglutamic acid, or homocysteic acid, or a charged amino acid having a side chain containing at least one heteroatom, (e.g. N, O, S, P) and with a side chain length of about 4 (or 3-5) atoms. In some embodiments the glucagon peptide retains its original selectivity for the glucagon receptor relative to the GLP-1 receptors.

[0550] Glucagon receptor activity can be reduced by an amino acid modification at position 3, e.g. substitution of the naturally occurring glutamine at position 3, with an acidic, basic, or a hydrophobic amino acid. For example substitution at position 3 with glutamic acid, ornithine, or norleucine substantially reduces or destroys glucagon receptor activity.

[0551] Maintained or enhanced activity at the glucagon receptor may be achieved by modifying the Gln at position 3 with a glutamine analog, as described herein. For example, glucagon agonists can comprise the amino acid sequence of any of SEQ ID NOs: 1243-1248, 1250, 1251, and 1253-1256.

[0552] Restoration of glucagon activity which has been reduced by amino acid modifications at positions 1 and 2 is provided by modifications that that stabilize the alpha helix structure of the C-terminal portion (amino acids 12-29) of the glucagon peptide or analog thereof. For example, an intramolecular bridge can be formed by a covalent bond between the side chains of two amino acids at positions i and i+4 or between positions j and j+3, or between positions k and k+7. In other embodiments, non-covalent interactions such as salt bridges can be formed between positively and negatively charged amino acids at these positions. In yet other embodiments, one or more α,α-disubstituted amino acids are inserted or substituted into this C-terminal portion (amino acids 12-29) at positions that retain the desired activity. For example, one, two, three or all of positions 16, 20, 21 or 24 are substituted with an α,α-disubstituted amino acid, e.g., Aib.

Modifications that Affect GLP-1 Activity

[0553] Enhanced activity at the GLP-1 receptor is provided by replacing the carboxylic acid of the C-terminal amino acid with a charge-neutral group, such as an amide or ester.

[0554] Enhanced activity at the GLP-1 receptor is also provided by stabilizing the alpha-helix structure in the C-terminal portion of glucagon (around amino acids 12-29), e.g., through formation of an intramolecular bridge between the side chains of two amino acids, or substitution and/or insertion of amino acids around positions 12-29 with an alpha helix-stabilizing amino acid (e.g., an α,α-disubstituted amino acid), as further described herein. In exemplary embodiments, the side chains of the amino acid pairs 12 and 16, 13 and 17, 16 and 20, 17 and 21, 20 and 24 or 24 and 28 (amino acid pairs in which i=12, 16, 20, or 24) are linked to one another and thus stabilize the glucagon alpha helix. In some embodiments, the bridge or linker is about 8 (or about 7-9) atoms in length, particularly when the bridge is between positions i and i+4. In some embodiments, the bridge or linker is about 6 (or about 5-7) atoms in length, particularly when the bridge is between positions j and j+3.

[0555] In some embodiments, intramolecular bridges are formed by (a) substituting the naturally occurring serine at position 16 with glutamic acid or with another negatively charged amino acid having a side chain with a length of 4 atoms, or alternatively with any one of glutamine, homoglutamic acid, or homocysteic acid, or a charged amino acid having a side chain containing at least one heteroatom, (e.g. N, O, S, P) and with a side chain length of about 4 (or 3-5) atoms, and (b) substituting the naturally occurring glutamine at position 20 with another hydrophilic amino acid having a side chain that is either charged or has an ability to hydrogen-bond, and is at least about 5 (or about 4-6) atoms in length, for example, lysine, citrulline, arginine, or ornithine. The side chains of such amino acids at positions 16 and 20 can form a salt bridge or can be covalently linked. In some embodiments the two amino acids are bound to one another to form a lactam ring.

[0556] In some embodiments, stabilization of the alpha helix structure in the C-terminal portion of the glucagon peptide is achieved through the formation of an intramolecular bridge other than a lactam bridge. For example, suitable covalent bonding methods include any one or more of olefin metathesis, lanthionine-based cyclization, disulfide bridge or modified sulfur-containing bridge formation, the use of α,ω-diaminoalkane tethers, the formation of metal-atom bridges, and other means of peptide cyclization are used to stabilize the alpha helix.

[0557] In yet other embodiments, one or more α,α-disubstituted amino acids are inserted or substituted into this C-terminal portion (amino acids 12-29) at positions that retain the desired activity. For example, one, two, three or all of positions 16, 20, 21 or 24 are substituted with an α,α-disubstituted amino acid, e.g., Aib.

[0558] Increased activity at the GLP-1 receptor is provided by an amino acid modification at position 20 as described herein.

[0559] Increased activity at the GLP-1 receptor is provided by adding GPSSGAPPPS (SEQ ID NO: 1095) or XGPSSGAPPPS (SEQ ID NO: 1096) to the C-terminus. GLP-1 activity in such analogs can be further increased by modifying the amino acid at position 18, 28 or 29, or at position 18 and 29, as described herein.

[0560] A further modest increase in GLP-1 potency is provided by modifying the amino acid at position 10 to be a large, aromatic amino acid residue, optionally Trp.

[0561] Reduced activity at the GLP-1 receptor is provided, e.g., by an amino acid modification at position 7 as described herein.

[0562] Potency at the GLP-1 receptor can be further enhanced by an alanine substitution for the native arginine at position 18.

[0563] Any of the modifications described above in reference to a Class 2 glucagon related peptide which increase GLP-1 receptor activity can be applied individually or in combination. Combinations of the modifications that increase GLP-1 receptor activity generally provide higher GLP-1 activity than any of such modifications taken alone. For example, the invention provides glucagon peptides that comprise modifications at position 16, at position 20, and at the C-terminal carboxylic acid group, optionally with a covalent bond between the amino acids at positions 16 and 20; glucagon peptides that comprise modifications at position 16 and at the C-terminal carboxylic acid group; glucagon peptides that comprise modifications at positions 16 and 20, optionally with a covalent bond between the amino acids at positions 16 and 20; and glucagon peptides that comprise modifications at position 20 and at the C-terminal carboxylic acid group.

Modifications that Improve DPP-IV Resistance

[0564] Modifications at position 1 and/or 2 can increase the peptide's resistance to dipeptidyl peptidase IV (DPP IV) cleavage. For example, position 1 and/or position 2 may be substituted with a DPP-IV resistant amino acid as described herein. In some embodiments, the amino acid at position 2 is substituted with N-methyl alanine.

[0565] It was observed that modifications at position 2 (e.g. Aib at position 2) and in some cases modifications at position 1 (e.g., DMIA at position 1) may reduce glucagon activity, sometimes significantly; surprisingly, this reduction in glucagon activity can be restored by stabilizing the alpha-helix structure in the C-terminal portion of glucagon (around amino acids 12-29), e.g., through formation of a covalent bond between the side chains of two amino acids, as described herein. In some embodiments, the covalent bond is between amino acids at positions “i” and “i+4”, or positions “j” and “j+3”, e.g., between positions 12 and 16, 16 and 20, and 24, 24 and 28, or 17 and 20. In exemplary embodiments, this covalent bond is a lactam bridge between a glutamic acid at position 16 and a lysine at position 20. In some embodiments, this covalent bond is an intramolecular bridge other than a lactam bridge, as described herein.

Modifications that Reduce Degradation

[0566] In yet further exemplary embodiments, any of the Class 2 glucagon related peptides can be further modified to improve stability by modifying the amino acid at position 15 and/or 16 of SEQ ID NO: 1001 to reduce degradation of the peptide over time, especially in acidic or alkaline buffers. Such modifications reduce cleavage of the Asp15-Ser16 peptide bond. In exemplary embodiments, the amino acid modification at position 15 is a deletion or substitution of Asp with glutamic acid, homoglutamic acid, cysteic acid or homocysteic acid. In other exemplary embodiments, the amino acid modification at position 16 is a deletion or substitution of Ser with Thr or Aib. In other exemplary embodiments, Ser at position 16 is substituted with glutamic acid or with another negatively charged amino acid having a side chain with a length of 4 atoms, or alternatively with any one of glutamine, homoglutamic acid, or homocysteic acid.

[0567] In some embodiments, the methionine residue present at position 27 of the native peptide is modified, e.g. by deletion or substitution. Such modifications may prevent oxidative degradation of the peptide. In some embodiments, the Met at position 27 is substituted with leucine, isoleucine or norleucine. In some specific embodiments, Met at position 27 is substituted with leucine or norleucine.

[0568] In some embodiments, the Gln at position 20 and/or 24 is modified, e.g. by deletion or substitution. Such modifications can reduce degradation that occurs through deamidation of Gln. In some embodiments, the Gln at position 20 and/or 24 is substituted with Ser, Thr, Ala or Aib. In some embodiments the Gln at position 20 and/or 24 is substituted with Lys, Arg, Orn, or Citrulline.

[0569] In some embodiments, the Asp at position 21 is modified, e.g. by deletion or substitution. Such modifications can reduce degradation that occurs through dehydration of Asp to form a cyclic succinimide intermediate followed by isomerization to iso-aspartate. In some embodiments, position 21 is substituted with Glu, homoglutamic acid or homocysteic acid. In some specific embodiments, position 21 is substituted with Glu.

### Stabilization of the Alpha Helix Structure

[0570] Stabilization of the alpha-helix structure in the C-terminal portion of the Class 2 glucagon related peptide (around amino acids 12-29) provides enhanced GLP-1 and/or GIP activity and restores glucagon activity which has been reduced by amino acid modifications at positions 1 and/or 2. The alpha helix structure can be stabilized by, e.g., formation of a covalent or non-covalent intramolecular bridge, or substitution and/or insertion of amino acids around positions 12-29 with an alpha helix-stabilizing amino acid (e.g., an α,α-disubstituted amino acid). Stabilization of the alpha-helix structure of a GIP agonist may be accomplished as described herein.

### Acylation and Alkylation

[0571] In accordance with some embodiments, the glucagon peptides disclosed herein are modified to comprise an acyl group or alkyl group, e.g., an acyl or alkyl group which is non-native to a naturally-occurring amino acid as described herein. Acylation or alkylation can increase the half-life of the glucagon peptides in circulation. Acylation or alkylation can advantageously delay the onset of action and/or extend the duration of action at the glucagon and/or GLP-1 receptors and/or improve resistance to proteases such as DPP-IV and/or improve solubility. Activity at the glucagon and/or GLP-1 and/or GIP receptors of the glucagon peptide may be maintained after acylation. In some embodiments, the potency of the acylated glucagon peptides is comparable to the unacylated versions of the glucagon peptides. Class 2 glucagon related peptides may be acylated or alkylated at the same amino acid position where a hydrophilic moiety is linked, or at a different amino acid position, as described herein.

[0572] In some embodiments, the invention provides a glucagon peptide modified to comprise an acyl group or alkyl group covalently linked to the amino acid at position 10 of the glucagon peptide. The glucagon peptide may further comprise a spacer between the amino acid at position 10 of the glucagon peptide and the acyl group or alkyl group. In some embodiments, the acyl group is a fatty acid or bile acid, or salt thereof, e.g. a C4 to C30 fatty acid, a C8 to C24 fatty acid, cholic acid, a C4 to C30 alkyl, a C8 to C24 alkyl, or an alkyl comprising a steroid moiety of a bile acid. The spacer is any moiety with suitable reactive groups for attaching acyl or alkyl groups. In exemplary embodiments, the spacer comprises an amino acid, a dipeptide, a tripeptide, a hydrophilic bifunctional, or a hydrophobic bifunctional spacer. In some embodiments, the spacer is selected from the group consisting of: Trp, Glu, Asp, Cys and a spacer comprising NH₂(CH₂CH₂O)ₙ(CH₂)ₘCOOH, wherein m is any integer from 1 to 6 and n is any integer from 2 to 12. Such acylated or alkylated glucagon peptides may also further comprise a hydrophilic moiety, optionally a polyethylene glycol. Any of the foregoing glucagon peptides may comprise two acyl groups or two alkyl groups, or a combination thereof.

### Conjugates and Fusions

[0573] The GIP agonist can be linked, optionally via covalent bonding and optionally via a linker, to a conjugate moiety as described herein.

[0574] In other embodiments, the second peptide is XGPSSGAPPPS (SEQ ID NO: 1096), wherein X is selected from one of the 20 common amino acids, e.g., glutamic acid, aspartic acid or glycine. In some embodiments X represents an amino acid, for example Cys, that further comprises a hydrophilic moiety covalently linked to the side chain of that amino acid. Such C-terminal extensions improve solubility and also can improve GIP or GLP-1 activity. In some embodiments wherein the glucagon peptide further comprises a carboxy terminal extension, the carboxy terminal amino acid of the extension ends in an amide group or an ester group rather than a carboxylic acid.

[0575] In some embodiments, e.g., in glucagon peptides which comprise the C-terminal extension, the threonine at position 29 of the native glucagon peptide is replaced with a glycine. For example, a glucagon peptide having a glycine substitution for threonine at position 29 and comprising the C-terminal extension of GPSSGAPPPS (SEQ ID NO: 1095) is four times as potent at the GLP-1 receptor as native glucagon modified to comprise the same C-terminal extension. This T29G substitution can be used in conjunction with other modifications disclosed herein to enhance the affinity of the glucagon peptides for the GLP-1 receptor. For example, the T29G substitution can be combined with the S16E and N20K amino acid substitutions, optionally with a lactam bridge between amino acids 16 and 20, and optionally with addition of a PEG chain as described herein.

[0576] In some embodiments an amino acid is added to the C-terminus, and the additional amino acid is selected from the group consisting of glutamic acid, aspartic acid and glycine.

Modifications that Enhance Solubility

[0577] In another embodiment, the solubility of any of the glucagon peptides can be improved by amino acid substitutions and/or additions that introduce a charged amino acid into the C-terminal portion of the peptide, preferably at a position C-terminal to position 27 of SEQ ID NO: 1001. Optionally, one, two or three charged amino acids may be introduced within the C-terminal portion, preferably C-terminal to position 27. In some embodiments the native amino acid(s) at positions 28 and/or 29 are substituted with one or two charged amino acids, and/or in a further embodiment one to three charged amino acids are also added to the C-terminus of the peptide. In exemplary embodiments, one, two or all of the charged amino acids are negatively charged. In some embodiments, the negatively charged (acidic amino acid) is aspartic acid or glutamic acid.

[0578] Additional modifications, e.g. conservative substitutions, may be made to the glucagon peptide that still allow it to retain GIP activity (and optionally GLP-1 activity and/or glucagon activity).

### Other Modifications

[0579] Any of the modifications described above in reference to a Class 2 peptide which increase or decrease GIP activity, which increase or decrease glucagon receptor activity, and which increase GLP-1 receptor activity can be applied individually or in combination. Any of the modifications described above in reference to a Class 2 glucagon related peptide can also be combined with other modifications that confer other desirable properties, such as increased solubility and/or stability and/or duration of action, as described herein with regard to Class 2 glucagon related peptides. Alternatively, any of the modifications described above in reference to Class 2 glucaton related peptides can be combined with other modifications described herein in reference to Class 2 glucagon related peptides that do not substantially affect solubility or stability or activity. Exemplary modifications include but are not limited to:

[0580] (A) Improving solubility, for example, by introducing one, two, three or more charged amino acid(s) to the C-terminal portion of native glucagon, preferably at a position C-terminal to position 27. Such a charged amino acid can be introduced by substituting a native amino acid with a charged amino acid, e.g. at positions 28 or 29, or alternatively by adding a charged amino acid, e.g. after position 27, 28 or 29. In exemplary embodiments, one, two, three or all of the charged amino acids are negatively charged. In other embodiments, one, two, three or all of the charged amino acids are positively charged. Such modifications increase solubility, e.g. provide at least 2-fold, 5-fold, 10-fold, 15-fold, 25-fold, 30-fold or greater solubility relative to native glucagon at a given pH between about 5.5 and 8, e.g., pH 7, when measured after 24 hours at 25° C.

[0581] (B) Increasing solubility and duration of action or half-life in circulation by addition of a hydrophilic moiety such as a polyethylene glycol chain, as described herein, e.g. at position 16, 17, 20, 21, 24 or 29, within a C-terminal extension, or at the C-terminal amino acid of the peptide,

[0582] (C) Increasing solubility and/or duration of action or half-life in circulation and/or delaying the onset of action by acylation or alkylation of the glucagon peptide, as described herein;

[0583] (D) Increasing duration of action or half-life in circulation through introducing resistance to dipeptidyl peptidase IV (DPP IV) cleavage by modification of the amino acid at position 1 or 2 as described herein.

[0584] (E) Increasing stability by modification of the Asp at position 15, for example, by deletion or substitution with glutamic acid, homoglutamic acid, cysteic acid or homocysteic acid. Such modifications can reduce degradation or cleavage at a pH within the range of 5.5 to 8, for example, retaining at least 75%, 80%, 90%, 95%, 96%, 97%, 98% or 99%, up to 100% of the original peptide after 24 hours at 25° C. Such modifications reduce cleavage of the peptide bond between Asp15-Ser16.

[0585] (F) Increasing stability by modification of the Ser at position 16, for example by substitution with Thr or Aib. Such modifications also reduce cleavage of the peptide bond between Asp15-Ser16.

[0586] (G) Increasing stability by modification of the methionine at position 27, for example, by substitution with leucine or norleucine. Such modifications can reduce oxidative degradation. Stability can also be increased by modification of the Gln at position 20 or 24, e.g. by substitution with Ser, Thr, Ala or Aib. Such modifications can reduce degradation that occurs through deamidation of Gln. Stability can be increased by modification of Asp at position 21, e.g. by substitution with Glu. Such modifications can reduce degradation that occurs through dehydration of Asp to form a cyclic succinimide intermediate followed by isomerization to iso-aspartate.

[0587] (H) Non-conservative or conservative substitutions, additions or deletions that do not substantially affect activity, for example, conservative substitutions at one or more of positions 2, 5, 9, 10, 11, 12, 13, 14, 15, 16, 17, 18, 19, 20, 21, 24, 27, 28 or 29; substitution of one or more of these positions with Ala; deletion of amino acids at one or more of positions 27, 28 or 29; or deletion of amino acid 29 optionally combined with a C-terminal amide or ester in place of the C-terminal carboxylic acid group; substitution of Lys at position 12 with Arg; substitution of Tyr at position 10 with Val or Phe;

[0588] Preservation of activity after pegylation is provided by the addition of GPSSGAPPPS (SEQ ID NO: 1095) to the C-terminus

[0589] Some positions of the native glucagon peptide can be modified while retaining at least some of the activities of the parent peptide. Accordingly, applicants anticipate that one or more of the amino acids located at positions at positions 2, 5, 10, 11, 12, 13, 14, 17, 18, 19, 20, 21, 24, 27, 28 or 29 can be substituted with an amino acid different from that present in the native glucagon peptide, and still retain activity at the glucagon receptor.

[0590] In some embodiments, position 18 is substituted with an amino acid selected from the group consisting of Ala, Ser, or Thr. In some embodiments the amino acid at position 20 is substituted with Ser, Thr, Lys, Arg, Orn, Citrulline or Aib. In some embodiments, position 21 is substituted with Glu, homoglutamic acid or homocysteic acid. In some embodiments, the glucagon peptide comprises 1 to 10 amino acid modifications selected from positions 16, 17, 18, 20, 21, 23, 24, 27, 28 and 29. In exemplary embodiments, the modifications are one or more amino acid substitutions selected from the group consisting of Gln17, Ala18, Glu21, Ile23, Ala24, Val27 and Gly29. In some embodiments, 1 to 2 amino acids selected from positions 17-26 differ from the parent peptide. In other embodiments, 1 to 2 amino acids selected from positions 17-22 differ from the parent peptide. In yet other embodiments, the modifications are Gln17, Ala18, Glu21, Ile23 and Ala24.

[0591] In some embodiments, one or more amino acids is added to the carboxy terminus of the glucagon peptide. The amino acid is typically selected from one of the 20 common amino acids, and in some embodiments the amino acid has an amide group in place of the carboxylic acid of the native amino acid. In exemplary embodiments the added amino acid is selected from the group consisting of glutamic acid and aspartic acid and glycine.

Other Modifications that do not Destroy Activity Include W10 or R20.

[0592] In some embodiments, the Class 2 glucagon related peptides disclosed herein are modified by truncation of the C-terminus by one or two amino acid residues yet retain similar activity and potency at the glucagon, GLP-1 and/or GIP receptors. In this regard, the amino acid at position 29 and/or 28 can be deleted.

### Exemplary Embodiments

[0593] In accordance with some embodiments of the invention, the analog of glucagon (SEQ ID NO: 1001) having GIP agonist activity comprises SEQ ID NO: 1001 with (a) an amino acid modification at position 1 that confers GIP agonist activity, (b) a modification which stabilizes the alpha helix structure of the C-terminal portion (amino acids 12-29) of the analog, and (c) optionally, 1 to 10 (e.g., 1, 2, 3, 4, 5, 6, 7, 8, 9, 10) further amino acid modifications. In some embodiments, the analog exhibits at least about 1% activity of native GIP at the GIP receptor or any other activity level at the GIP receptor described herein.

[0594] In certain embodiments, the modification which stabilizes the alpha helix structure is one which provides or introduces an intramolecular bridge, including, for example, a covalent intramolecular bridge, such as any of those described herein. The covalent intramolecular bridge in some embodiments is a lactam bridge. The lactam bridge of the analog of these embodiments can be a lactam bridge as described herein. See, e.g., the teachings of lactam bridges under the section “Stabilization of the Alpha Helix Structure.” For example, the lactam bridge may be one which is between the side chains of amino acids at positions i and i+4 or between the side chains of amino acids at positions j and j+3, wherein i is 12, 13, 16, 17, 20 or 24, and wherein j is 17. In certain embodiments, the lactam bridge can be between the amino acids at positions 16 and 20, wherein one of the amino acids at positions 16 and 20 is substituted with Glu and the other of the amino acids at positions 16 and 20 is substituted with Lys.

[0595] In alternative embodiments, the modification which stabilizes the alpha helix structure is the introduction of one, two, three, or four α,α-disubstituted amino acids at position(s) 16, 20, 21, and 24 of the analog. In some embodiments, the α,α-disubstituted amino acid is Aib. In certain aspects, the α,α-disubstituted amino acid (e.g., Aib) is at position 20 and the amino acid at position 16 is substituted with a positive-charged amino acid, such as, for example, an amino acid of Formula IV, which is described herein. The amino acid of Formula IV may be homoLys, Lys, Orn, or 2,4-diaminobutyric acid (Dab).

[0596] In specific aspects of the invention, the amino acid modification at position 1 is a substitution of His with an amino acid lacking an imidazole side chain, e.g. a large, aromatic amino acid (e.g., Tyr).

[0597] In certain aspects, the analog of glucagon comprises amino acid modifications at one, two or all of positions 27, 28 and 29. For example, the Met at position 27 can be substituted with a large aliphatic amino acid, optionally Leu, the Asn at position 28 can be substituted with a small aliphatic amino acid, optionally Ala, the Thr at position 29 can be substituted with a small aliphatic amino acid, optionally Gly, or a combination of two or three of the foregoing. In specific embodiments, the analog of glucagon comprises Leu at position 27, Ala at position 28, and Gly or Thr at position 29.

[0598] In certain embodiments of the invention, the analog of glucagon comprises an extension of 1 to 21 amino acids C-terminal to the amino acid at position 29. The extension can comprise the amino acid sequence of SEQ ID NO: 1095 or 1096, for instance. Additionally or alternatively, the analog of glucagon can comprise an extension of which 1-6 amino acids of the extension are positive-charged amino acids. The positive-charged amino acids may be amino acids of Formula IV, including, but not limited to Lys, homoLys, Orn, and Dab.

[0599] The analog of glucagon in some embodiments is acylated or alkylated as described herein. For instance, the acyl or alkyl group may be attached to the analog of glucagon, with or without a spacer, at position 10 or 40 of the analog, as further described herein. The analog may additionally or alternatively be modified to comprise a hydrophilic moiety as further described herein. Furthermore, in some embodiments, the analog comprises any one or a combination of the following modifications:

[0600] (a) Ser at position 2 substituted with D-Ser, Ala, D-Ala, Gly, N-methyl-Ser, Aib, Val, or α-amino-N-butyric acid;

[0601] (b) Tyr at position 10 substituted with Trp, Lys, Orn, Glu, Phe, or Val:

[0602] (c) Linkage of an acyl group to a Lys at position 10;

[0603] (d) Lys at position 12 substituted with Arg or Ile;

[0604] (e) Ser at position 16 substituted with Glu, Gln, homoglutamic acid, homocysteic acid, Thr, Gly, or Aib;

[0605] (f) Arg at position 17 substituted with Gln;

[0606] (g) Arg at position 18 substituted with Ala, Ser, Thr, or Gly;

[0607] (h) Gln at position 20 substituted with Ser, Thr, Ala, Lys, Citrulline, Arg, Orn, or Aib;

[0608] (i) Asp at position 21 substituted with Glu, homoglutamic acid, homocysteic acid;

[0609] (j) Val at position 23 substituted with Ile;

[0610] (k) Gln at position 24 substituted with Asn, Ser, Thr, Ala, or Aib;

[0611] (l) and a conservative substitution at any of positions 2 5, 9, 10, 11, 12. 13, 14, 15, 16, 8 19 20, 21. 24, 27, 28, and 29.

[0612] In exemplary embodiments, the analog of glucagon (SEQ ID NO: 1001) having GIP agonist activity comprises the following modifications:

[0613] (a) an amino acid modification at position 1 that confers GIP agonist activity,

[0614] (b) a lactam bridge between the side chains of amino acids at positions i and i+4 or between the side chains of amino acids at positions j and j+3, wherein i is 12, 13, 16, 17, 20 or 24, and wherein j is 17,

[0615] (c) amino acid modifications at one, two or all of positions 27, 28 and 29, e.g., amino acid modifications at position 27 and/or 28, and

[0616] (d) 1-9 or 1-6 further amino acid modifications, e.g. 1, 2, 3, 4, 5, 6, 7, 8 or 9 further amino acid modifications,

[0617] and the EC₅₀ of the analog for GIP receptor activation is about 10 nM or less.

[0618] The lactam bridge of the analog of these embodiments can be a lactam bridge as described herein. See, e.g., the teachings of lactam bridges under the section “Stabilization of the Alpha Helix Structure.” For example, the lactam bridge can be between the amino acids at positions 16 and 20, wherein one of the amino acids at positions 16 and 20 is substituted with Glu and the other of the amino acids at positions 16 and 20 is substituted with Lys.

[0619] In accordance with these embodiments, the analog can comprise, for example, the amino acid sequence of any of SEQ ID NOs: 1005-1094.

[0620] In other exemplary embodiments, the analog of glucagon (SEQ ID NO: 1001) having GIP agonist activity comprises the following modifications:

[0621] (a) an amino acid modification at position 1 that confers GIP agonist activity,

[0622] (b) one, two, three, or all of the amino acids at positions 16, 20, 21, and 24 of the analog is substituted with an α,α-disubstituted amino acid,

[0623] (c) amino acid modifications at one, two or all of positions 27, 28 and 29, e.g., amino acid modifications at position 27 and/or 28, and

[0624] (d) 1-9 or 1-6 further amino acid modifications, e.g. 1, 2, 3, 4, 5, 6, 7, 8 or 9 further amino acid modifications,

[0625] and the EC₅₀ of the analog for GIP receptor activation is about 10 nM or less.

[0626] The α,α-disubstituted amino acid of the analog of these embodiments can be any α,α-disubstituted amino acid, including, but not limited to, amino iso-butyric acid (Aib), an amino acid disubstituted with the same or a different group selected from methyl, ethyl, propyl, and n-butyl, or with a cyclooctane or cycloheptane (e.g., 1-aminocyclooctane-1-carboxylic acid). In certain embodiments, the α,α-disubstituted amino acid is Aib. In certain embodiments, the amino acid at position 20 is substituted with an α,α-disubstituted amino acid, e.g., Aib.

[0627] In accordance with these embodiments, the analog can comprise, for example, the amino acid sequence of any of SEQ ID NOs: 1099-1141, 1144-1164, 1166-1169, and 1173-1178.

[0628] In yet other exemplary embodiments, the analog of glucagon (SEQ ID NO: 1001) having GIP agonist activity comprises the following modifications:

[0629] (a) an amino acid modification at position 1 that confers GIP agonist activity,

[0630] (b) an amino acid substitution of Ser at position 16 with an amino acid of Formula IV:

[chemical structure]

[0631] wherein n is 1 to 16, or 1 to 10, or 1 to 7, or 1 to 6, or 2 to 6, each of R1 and R2 is independently selected from the group consisting of H, C1-C18 alkyl, (C1-C18 alkyl)OH, (C1-C18 alkyl)NH2, (C1-C18 alkyl)SH, (C0-C4 alkyl)(C3-C6)cycloalkyl, (C0-C4 alkyl)(C2-C5 heterocyclic), (C0-C4 alkyl)(C6-C10 aryl)R7, and (C1-C4 alkyl)(C3-C9 heteroaryl), wherein R7 is H or OH, and the side chain of the amino acid of Formula IV comprises a free amino group,

[0632] (c) an amino acid substitution of the Gln at position 20 with an alpha, alpha-disubstituted amino acid,

[0633] (d) amino acid modifications at one, two or all of positions 27, 28 and 29, e.g., amino acid modifications at position 27 and/or 28, and

[0634] (e) 1-9 or 1-6 further amino acid modifications, e.g. 1, 2, 3, 4, 5, 6, 7, 8 or 9 further amino acid modifications,

[0635] and the EC₅₀ of the analog for GIP receptor activation is about 10 nM or less.

[0636] The amino acid of Formula IV of the analog of these embodiments may be any amino acid, such as, for example, the amino acid of Formula IV, wherein n is 1, 2, 3, 4, 5, 6, 7, 8, 9, 10, 11, 12, 13, 14, 15, or 16. In certain embodiments, n is 2, 3, 4, or 5, in which case, the amino acid is Dab, Orn, Lys, or homoLys respectively.

[0637] The alpha, alpha-disubstituted amino acid of the analog of these embodiments may be any alpha, alpha-disubstituted amino acid, including, but not limited to, amino iso-butyric acid (Aib), an amino acid disubstituted with the same or a different group selected from methyl, ethyl, propyl, and n-butyl, or with a cyclooctane or cycloheptane (e.g., 1-aminocyclooctane-1-carboxylic acid). In certain embodiments, the alpha, alpha-disubstituted amino acid is Aib.

[0638] In accordance with these embodiments, the analog can comprise, for example, the amino acid sequence of any of SEQ ID NOs: 1099-1165.

[0639] In yet other exemplary embodiments, the analog of glucagon (SEQ ID NO: 1001) having GIP agonist activity comprises:

[0640] (a) an amino acid modification at position 1 that confers GIP agonist activity, and

[0641] (b) an extension of about 1 to about 21 amino acids C-terminal to the amino acid at position 29, wherein at least one of the amino acids of the extension is acylated or alkylated,

[0642] wherein the EC₅₀ of the analog for GIP receptor activation is about 10 nM or less.

[0643] In some embodiments, the acylated or alkylated amino acid is an amino acid of Formula I, II, or III. In more specific embodiments, the amino acid of Formula I is Dab, Orn, Lys, or homoLys. Also, in some embodiments, the extension of about 1 to about 21 amino acids comprises the amino acid sequence of GPSSGAPPPS (SEQ ID NO: 1095) or XGPSSGAPPPS (SEQ ID NO: 1096), wherein X is any amino acid, or GPSSGAPPPK (SEQ ID NO: 1170) or XGPSSGAPPPK (SEQ ID NO: 1171) or XGPSSGAPPPSK (SEQ ID NO: 1172), wherein X is Gly or a small, aliphatic or non-polar or slightly polar amino acid. In some embodiments, the about 1 to about 21 amino acids may comprise sequences containing one or more conservative substitutions relative to SEQ ID NO: 1095, 1096, 1170, 1171 or 1172. In some embodiments, the acylated or alkylated amino acid is located at position 37, 38, 39, 40, 41, 42, or 43 of the C-terminally-extended analog. In certain embodiments, the acylated or alkylated amino acid is located at position 40 of the C-terminally extended analog.

[0644] In some embodiments, the analog having GIP agonist activity further comprises amino acid modifications at one, two or all of positions 27, 28 and 29, e.g., amino acid modifications at position 27 and/or 28.

[0645] In any of the above exemplary embodiments, the amino acid modification at position 1 that confers GIP agonist activity can be a substitution of His with an amino acid lacking an imidazole side chain. The amino acid modification at position 1 can, for example, be a substitution of His with a large, aromatic amino acid. In some embodiments, the large, aromatic amino acid is any of those described herein, including, for example, Tyr.

[0646] In certain aspects, the analog does not comprise an amino acid modification at position 1 which modification confers GIP agonist activity. In some aspects, the amino acid at position 1 is not a large, aromatic amino acid, e.g., Tyr. In some embodiments, the amino acid at position 1 is an amino acid comprising an imidazole ring, e.g., H is, analogs of His. In certain embodiments, the analog is not any of the compounds disclosed in International Patent Application Publication No. WO 2010/011439. In certain aspects, the analog comprises the amino acid sequence of any of SEQ ID NOs: 1263-1275.

[0647] Also, with regard to the above exemplary embodiments, amino acid modifications at one, two, or all of positions 27, 28, and 29 can be any of the modifications at these positions described herein. For example, the Met at position 27 can be substituted with a large aliphatic amino acid, optionally Leu, the Asn at position 28 can be substituted with a small aliphatic amino acid, optionally Ala, and/or the Thr at position 29 can be substituted with a small aliphatic amino acid, optionally Gly. Alternatively, the analog can comprise such amino acid modifications at position 27 and/or 28.

[0648] The analog of the above exemplary embodiments can further comprise 1-9 or 1-6 further, additional amino acid modifications, e.g. 1, 2, 3, 4, 5, 6, 7, 8 or 9 further amino acid modifications, such as, for example, any of the modifications described herein which increase or decrease the activity at any of the GIP, GLP-1, and glucagon receptors, improve solubility, improve duration of action or half-life in circulation, delay the onset of action, or increase stability. The analog can further comprise, for example, an amino acid modification at position 12, optionally, a substitution with Ile, and/or amino acid modifications at positions 17 and 18, optionally substitution with Q at position 17 and A at position 18, and/or an addition of GPSSGAPPPS (SEQ ID NO: 1095) or XGPSSGAPPPS (SEQ ID NO: 1096), or sequences containing one or more conservative substitutions relative to SEQ ID NO: 1095 or 1096, to the C-terminus. The analog can comprise one or more of the following modifications:

[0649] (i) Ser at position 2 substituted with D-Ser, Ala, D-Ala, Gly, N-methyl-Ser, Aib, Val, or α-amino-N-butyric acid;

[0650] (ii) Tyr at position 10 substituted with Trp, Lys, Orn, Glu, Phe, or Val;

[0651] (iii) Linkage of an acyl group to a Lys at position 10;

[0652] (iv) Lys at position 12 substituted with Arg;

[0653] (v) Ser at position 16 substituted with Glu, Gln, homoglutamic acid, homocysteic acid, Thr, Gly, or Aib;

[0654] (vi) Arg at position 17 substituted with Gln;

[0655] (vii) Arg at position 18 substituted with Ala, Ser, Thr, or Gly;

[0656] (viii) Gln at position 20 substituted with Ala, Ser, Thr, Lys, Citrulline, Arg, Orn, or Aib;

[0657] (ix) Asp at position 21 substituted with Glu, homoglutamic acid, homocysteic acid;

[0658] (x) Val at position 23 substituted with Ile;

[0659] (xi) Gln at position 24 substituted with Asn, Ala, Ser, Thr, or Aib; and

[0660] (xii) a conservative substitution at any of positions 2, 5, 9, 10, 11, 12, 13, 14, 15, 16, 17, 18, 19, 20, 21, 24, 27, 28, and 29.

[0661] The analog in some embodiments comprise a combination of the modifications (i) through (xii). Alternatively or additionally, the analog can comprise an amino acid modification at position 3 (e.g., an amino acid substitution of Gln with Glu), wherein the analog has less than 1% of the activity of glucagon at the glucagon receptor. Alternatively or additionally, the analog can comprise an amino acid modification at position 7 (e.g., an amino acid substitution of Thr with an amino acid lacking a hydroxyl group, e.g., Abu or Ile), wherein the analog has less than about 10% of the activity of GLP-1 at the GLP-1 receptor.

[0662] With regard to the exemplary embodiments, the analog can be covalently linked to a hydrophilic moiety. In some embodiments, the analog is covalently linked to the hydrophilic moiety at any of amino acid positions 16, 17, 20, 21, 24, 29, 40, or the C-terminus In certain embodiments, the analog comprises a C-terminal extension (e.g., an amino acid sequence of SEQ ID NO: 1095) and an addition of an amino acid comprising the hydrophilic moiety, such that the hydrophilic moiety is covalently linked to the analog at position 40.

[0663] In some embodiments, the hydrophilic moiety is covalently linked to a Lys, Cys, Orn, homocysteine, or acetyl-phenylalanine of the analog. The Lys, Cys, Orn, homocysteine, or acetyl-phenylalanine may be an amino acid that is native to the glucagon sequence (SEQ ID NO: 1001) or it may be an amino acid which is replacing a native amino acid of SEQ ID NO: 1001. In some embodiments, wherein the hydrophilic moiety is attached to a Cys, the linkage to the hydrophilic moiety can comprise the structure

[chemical structure]

[0664] With regard to the analogs comprising a hydrophilic moiety, the hydrophilic moiety may be any of those described herein. See, e.g., the teachings under the section “Linkage of hydrophilic moieties.” In some embodiments, the hydrophilic moiety is a polyethylene glycol (PEG). The PEG in certain embodiments has a molecular weight of about 1,000 Daltons to about 40,000 Daltons, e.g., about 20,000 Daltons to about 40,000 Daltons.

[0665] With regard to the exemplary embodiments, the analog can comprise a modified amino acid in which the side chain is covalently linked to an acyl or alkyl group (e.g., an acyl or alkyl group which is non-native to a naturally-occurring amino acid). The acylated or alkylated analog can be in accordance with acylated or alkylated peptides described in the section “Acylation and alkylation.” In some embodiments, the acyl group is a C4 to a C30 fatty acyl group, such as, for example, a C10 fatty acyl or alkyl group, a C12 fatty acyl or alkyl group, a C14 fatty acyl or alkyl group, a C16 fatty acyl or alkyl group, a C18 fatty acyl or alkyl group, a C20 acyl or alkyl group, or a C22 acyl or alkyl group. The acyl or alkyl group may be covalently attached to any amino acid of the analog, including, but not limited to the amino acid at position 10 or 40, or the C-terminal amino acid. In certain embodiments, the analog comprises a C-terminal extension (e.g., an amino acid sequence of SEQ ID NO: 1095) and an addition of an amino acid comprising the acyl or alkyl group, such that the acyl or alkyl group is covalently linked to the analog at position 40. In some embodiments, the acyl or alkyl group is covalently linked to the side chain of an amino acid of Formula I, II, or III, e.g., a Lys residue. The acyl or alkyl group may be covalently linked to an amino acid which is native to the glucagon sequence (SEQ ID NO: 1001) or may be linked to an amino acid which is added to the sequence of SEQ ID NO: 1001 or to the sequence of SEQ ID NO: 1001 followed by SEQ ID NO: 1095 (at the N- or C-terminus) or may be linked to an amino acid which replaces a native amino acid, e.g., the Tyr at position 10 of SEQ ID NO: 1001.

[0666] In the above exemplary embodiments, wherein the analog comprises an acyl or alkyl group, the analog may be attached to the acyl or alkyl group via a spacer, as described herein. The spacer, for example, may be 3 to 10 atoms in length and may be, for instance, an amino acid

[0667] (e.g., 6-amino hexanoic acid, any amino acid described herein), a dipeptide (e.g., Ala-Ala, βAla-βAla, Leu-Leu, Pro-Pro, γ-Glu-γ-Glu), a tripeptide, or a hydrophilic or hydrophobic bifunctional spacer. In certain aspects, the total length of the spacer and the acyl or alkyl group is about 14 to about 28 atoms. In some embodiments, the amino acid spacer is not γ-Glu. In some embodiments, the dipeptide spacer is not γ-Glu-γ-Glu.

[0668] In still further exemplary embodiments, the analog of glucagon having GIP agonist activity comprises the amino acid sequence according to any one of SEQ ID NOs: 1227, 1228, 1229 or 1230 that further comprises the following modifications:

[0669] (a) optionally, an amino acid modification at position 1 that confers GIP agonist activity,

[0670] (b) an extension of about 1 to about 21 amino acids C-terminal to the amino acid at position 29, wherein at least one of the amino acids of the extension is acylated or alkylated, and

[0671] (d) up to 6 further amino acid modifications,

[0672] wherein the EC₅₀ of the analog for GIP receptor activation is about 10 nM or less.

[0673] In some aspects, the acylated or alkylated amino acid is an amino acid of Formula I, II, or III. In more specific embodiments, the amino acid of Formula I is Dab, Orn, Lys, or homoLys. Also, in some embodiments, the about 1 to about 21 amino acids comprises the amino acid sequence of GPSSGAPPPS (SEQ ID NO: 1095) or XGPSSGAPPPS (SEQ ID NO: 1096), wherein X is any amino acid, or GPSSGAPPPK (SEQ ID NO: 1170) or XGPSSGAPPPK (SEQ ID NO: 1171) or XGPSSGAPPPSK (SEQ ID NO: 1172), wherein X is Gly or a small, aliphatic or non-polar or slightly polar amino acid. In some embodiments, the about 1 to about 21 amino acids may comprise sequences containing one or more conservative substitutions relative to SEQ ID NO: 1095, 1096, 1170, 1171 or 1172. In some embodiments, the acylated or alkylated amino acid is located at position 37, 38, 39, 40, 41, 42, or 43 of the C-terminally-extended analog. In certain embodiments, the acylated or alkylated amino acid is located at position 40 of the C-terminally extended analog.

[0674] In any of the above exemplary embodiments, the amino acid at position 1 that confers GIP agonist activity can be an amino acid lacking an imidazole side chain. The amino acid at position 1 can, for example, be a large, aromatic amino acid. In some embodiments, the large, aromatic amino acid is any of those described herein, including, for example, Tyr.

[0675] The analog of the above exemplary embodiments can further comprise 1-6 further amino acid modifications, such as, for example, any of the modifications described herein which increase or decrease the activity at any of the GIP, GLP-1, and glucagon receptors, improve solubility, improve duration of action or half-life in circulation, delay the onset of action, or increase stability.

[0676] In certain aspects, glucagon analogs described in the above exemplary embodiment, comprise further amino acid modifications at one, two or all of positions 27, 28 and 29. Modifications at these positions can be any of the modifications described herein relative to these positions. For example, relative to SEQ ID NO: 1227, 1228, 1229 or 1230, position 27 can be substituted with a large aliphatic amino acid (e.g., Leu, Ile or norleucine) or Met, position 28 can be substituted with another small aliphatic amino acid (e.g., Gly or Ala) or Asn, and/or position 29 can be substituted with another small aliphatic amino acid (e.g., Ala or Gly) or Thr. Alternatively, the analog can comprise such amino acid modifications at position 27 and/or 28.

[0677] The analog can further comprise one or more of the following additional modifications:

[0678] (i) the amino acid at position 2 is any one of D-Ser, Ala, D-Ala, Gly, N-methyl-Ser, Aib, Val, or α-amino-N-butyric acid;

[0679] (ii) the amino acid at position 10 is Tyr, Trp, Lys, Orn, Glu, Phe, or Val;

[0680] (iii) linkage of an acyl group to a Lys at position 10;

[0681] (iv) the amino acid at position 12 is Ile, Lys or Arg;

[0682] (v) the amino acid at position 16 is any one of Ser, Glu, Gln, homoglutamic acid, homocysteic acid, Thr, Gly, or Aib;

[0683] (vi) the amino acid at position 17 is Gln or Arg;

[0684] (vii) the amino acid at position 18 is any one of Ala, Arg, Ser, Thr, or Gly;

[0685] (viii) the amino acid at position 20 is any one of Ala, Ser, Thr, Lys, Citrulline, Arg, Orn, or Aib or another alpha, alpha-disubstituted amino acid;

[0686] (ix) the amino acid at position 21 is any one of Glu, Asp, homoglutamic acid, homocysteic acid;

[0687] (x) the amino acid at position 23 is Val or Ile;

[0688] (xi) the amino acid at position 24 is any one of Gln, Asn, Ala, Ser, Thr, or Aib; and

[0689] (xii) one or more conservative substitutions at any of positions 2, 5, 9, 10, 11, 12, 13, 14, 15, 16, 17, 18, 19, 20, 21, 24, 27, 28, and 29.

[0690] The analog in some embodiments comprise a combination of the modifications (i) through (xii). Alternatively or additionally, the analog can comprise an amino acid modification at position 3 (e.g., an amino acid substitution of Gln with Glu), wherein the analog has less than 1% of the activity of glucagon at the glucagon receptor. Alternatively or additionally, the analog can comprise an amino acid modification at position 7 (e.g., an amino acid substitution of Thr with an amino acid lacking a hydroxyl group, e.g., Abu or Ile), wherein the analog has less than about 10% of the activity of GLP-1 at the GLP-1 receptor.

[0691] With regard to the exemplary embodiments, the analog can be covalently linked to a hydrophilic moiety. In some embodiments, the analog is covalently linked to the hydrophilic moiety at any of amino acid positions 16, 17, 20, 21, 24, 29, 40, or the C-terminus In certain embodiments, the analog comprises a hydrophilic moiety covalently linked to the analog at position 24.

[0692] In some embodiments, the hydrophilic moiety is covalently linked to a Lys, Cys, Orn, homocysteine, or acetyl-phenylalanine of the analog. The Lys, Cys, Orn, homocysteine, or acetyl-phenylalanine may be an amino acid that is native to SEQ ID NO: 1001, 1227, 1228, 1229 or 1230 or it may be a substituted amino acid. In some embodiments, wherein the hydrophilic moiety is linked to a Cys, the linkage may comprise the structure

[chemical structure]

[0693] With regard to the analogs comprising a hydrophilic moiety, the hydrophilic moiety may be any of those described herein. See, e.g., the teachings under the section “Linkage of hydrophilic moieties.” In some embodiments, the hydrophilic moiety is a polyethylene glycol (PEG). The PEG in certain embodiments has a molecular weight of about 1,000 Daltons to about 40,000 Daltons, e.g., about 20,000 Daltons to about 40,000 Daltons.

[0694] With regard to the exemplary embodiments, the analog can comprise a modified amino acid within the C-terminal extension in which the side chain is covalently linked to an acyl or alkyl group. The acylated or alkylated analog can be in accordance with acylated or alkylated peptides described in the section “Acylation and alkylation.” In some embodiments, the acyl group is a C4 to a C30 fatty acyl group, such as, for example, a C10 fatty acyl or alkyl group, a C12 fatty acyl or alkyl group, a C14 fatty acyl or alkyl group, a C16 fatty acyl or alkyl group, a C18 fatty acyl or alkyl group, a C20 acyl or alkyl group, or a C22 acyl or alkyl group. The acyl or alkyl group may be covalently attached to any amino acid of the analog, including, but not limited to the amino acid at position 10 or 40, or the C-terminal amino acid. In some embodiments, the acyl or alkyl group is covalently linked to the side chain of an amino acid of Formula I, II, or III, e.g., a Lys residue. The acyl or alkyl group is covalently linked to an amino acid which is native to SEQ ID NO: 1001, 1227, 1228, 1229 or 1230 or it may be linked to a substituted amino acid. The acyl or alkyl group is covalently linked to an amino acid which is native to SEQ ID NO: 1095, 1096, 1171 or 1172, or it may be linked to a substituted amino acid.

[0695] In the above exemplary embodiments, wherein the analog comprises an acyl or alkyl group, the analog may be attached to the acyl or alkyl group via a spacer, as described herein. The spacer, for example, may be 3 to 10 atoms in length and may be, for instance, an amino acid (e.g., 6-amino hexanoic acid, any amino acid described herein), a dipeptide (e.g., Ala-Ala, βAla-βAla, Leu-Leu, Pro-Pro, γ-Glu-γ-Glu), a tripeptide, or a hydrophilic or hydrophobic bifunctional spacer. In certain aspects, the total length of the spacer and the acyl or alkyl group is about 14 to about 28 atoms. In some embodiments, the amino acid spacer is not γ-Glu. In some embodiments, the dipeptide spacer is not γ-Glu-γ-Glu.

[0696] In some very specific embodiments, an analog of the invention comprises an amino acid sequence selected from the group consisting of SEQ ID NOs: 1099-1141, 1144-1164, 1166, 1192-1207, 1209-1221 and 1223 or selected from the group consisting of SEQ ID NOs: 1167-1169, 1173-1178 and 1225.

[0697] Further, specific examples of analogs of the invention include but are not limited to, any of those referenced in Tables 1-3.

[0698] In still further exemplary embodiments, the analog of glucagon having GIP agonist activity comprises an acyl or alkyl group (e.g., an acyl or alkyl group which is non-native to a naturally occurring amino acid), wherein the acyl or alkyl group is attached to a spacer, wherein (i) the spacer is attached to the side chain of the amino acid at position 10 of the analog; or (ii) the analog comprises an extension of 1 to 21 amino acids C-terminal to the amino acid at position 29 and the spacer is attached to the side chain of an amino acid corresponding to one of positions 37-43 relative to SEQ ID NO: 1001, wherein the EC₅₀ of the analog for GIP receptor activation is about 10 nM or less.

[0699] In such embodiments, the analog may comprise an amino acid sequence of SEQ ID NO: 1001 with (i) an amino acid modification at position 1 that confers GIP agonist activity, (ii) amino acid modifications at one, two, or all of positions 27, 28, and 29, (iii) at least one of:

[0700] (A) the analog comprises a lactam bridge between the side chains of amino acids at positions i and i+4 or between the side chains of amino acids at positions j and j+3, wherein i is 12, 13, 16, 17, 20 or 24, and wherein j is 17;

[0701] (B) one, two, three, or all of the amino acids at positions 16, 20, 21, and 24 of the analog is substituted with an α,α-disubstituted amino acid; or

[0702] (C) the analog comprises (i) an amino acid substitution of Ser at position 16 with an amino acid of Formula IV:

[chemical structure]

wherein n is 1 to 7, wherein each of R1 and R2 is independently selected from the group consisting of H, C₁-C₁₈ alkyl, (C₁-C₁₈ alkyl)OH, (C₁-C₁₈ alkyl)NH₂, (C₁-C₁₈ alkyl)SH, (C₀-C₄ alkyl)(C₃-C₆)cycloalkyl, (C₀-C₄ alkyl)(C₂-C₅ heterocyclic), (C₀-C₄ alkyl)(C₆-C₁₀ aryl)R₇, and (C₁-C₄ alkyl)(C₃-C₉ heteroaryl), wherein R₇ is H or OH, and the side chain of the amino acid of Formula IV comprises a free amino group; and (ii) an amino acid substitution of the Gln at position 20 with an alpha, alpha-disubstituted amino acid.

[0703] and (iv) up to 6 further amino acid modifications.

[0704] The alpha, alpha-disubstituted amino acid of the analog of these embodiments may be any alpha, alpha-disubstituted amino acid, including, but not limited to, amino iso-butyric acid (Aib), an amino acid disubstituted with the same or a different group selected from methyl, ethyl, propyl, and n-butyl, or with a cyclooctane or cycloheptane (e.g., 1-aminocyclooctane-1-carboxylic acid). In certain embodiments, the alpha, alpha-disubstituted amino acid is Aib.

[0705] The amino acid of Formula IV of the analog of these embodiments may be any amino acid, such as, for example, the amino acid of Formula IV, wherein n is 1, 2, 3, 4, 5, 6, 7, 8, 9, 10, 11, 12, 13, 14, 15, or 16. In certain embodiments, n is 2, 3, 4, or 5, in which case, the amino acid is Dab, Orn, Lys, or homoLys respectively.

[0706] In any of the above exemplary embodiments, the amino acid modification at position 1 that confers GIP agonist activity can be a substitution of His with an amino acid lacking an imidazole side chain. The amino acid modification at position 1 can, for example, be a substitution of His with a large, aromatic amino acid. In some embodiments, the large, aromatic amino acid is any of those described herein, including, for example, Tyr.

[0707] Also, with regard to the above exemplary embodiments, amino acid modifications at one, two, or all of positions 27, 28, and 29 can be any of the modifications at these positions described herein. For example, the Met at position 27 can be substituted with a large aliphatic amino acid, optionally Leu, the Asn at position 28 can be substituted with a small aliphatic amino acid, optionally Ala, and/or the Thr at position 29 can be substituted with a small aliphatic amino acid, optionally Gly. Alternatively, the analog can comprise such amino acid modifications at position 27 and/or 28.

[0708] The analog of the above exemplary embodiments can further comprise 1-9 or 1-6 further, additional amino acid modifications, e.g. 1, 2, 3, 4, 5, 6, 7, 8 or 9 further amino acid modifications, such as, for example, any of the modifications described herein which increase or decrease the activity at any of the GIP, GLP-1, and glucagon receptors, improve solubility, improve duration of action or half-life in circulation, delay the onset of action, or increase stability. The analog can further comprise, for example, an amino acid modification at position 12, optionally, a substitution with Ile, and/or amino acid modifications at positions 17 and 18, optionally substitution with Q at position 17 and A at position 18, and/or an addition of GPSSGAPPPS (SEQ ID NO: 1095) or XGPSSGAPPPS (SEQ ID NO: 1096), or sequences containing one or more conservative substitutions relative to SEQ ID NO: 1095 or 1096, to the C-terminus. The analog can comprise one or more of the following modifications:

[0709] (i) Ser at position 2 substituted with D-Ser, Ala, D-Ala, Gly, N-methyl-Ser, Aib, Val, or α-amino-N-butyric acid;

[0710] (ii) Tyr at position 10 substituted with Trp, Lys, Orn, Glu, Phe, or Val;

[0711] (iii) Linkage of an acyl group to a Lys at position 10;

[0712] (iv) Lys at position 12 substituted with Arg;

[0713] (v) Ser at position 16 substituted with Glu, Gln, homoglutamic acid, homocysteic acid, Thr, Gly, Lys, or Aib;

[0714] (vi) Arg at position 17 substituted with Gln;

[0715] (vii) Arg at position 18 substituted with Ala, Ser, Thr, or Gly;

[0716] (viii) Gln at position 20 substituted with Ala, Ser, Thr, Lys, Citrulline, Arg, Orn, or Aib;

[0717] (ix) Asp at position 21 substituted with Glu, homoglutamic acid, homocysteic acid;

[0718] (x) Val at position 23 substituted with Ile;

[0719] (xi) Gln at position 24 substituted with Asn, Ala, Ser, Thr, or Aib; and

[0720] (xii) a conservative substitution at any of positions 2, 5, 9, 10, 11, 12, 13, 14, 15, 16, 17, 18, 19, 20, 21, 24, 27, 28, and 29.

[0721] The analog in some embodiments comprise a combination of the modifications (i) through (xii). Alternatively or additionally, the analog can comprise an amino acid modification at position 3 (e.g., an amino acid substitution of Gln with Glu), wherein the analog has less than 1% of the activity of glucagon at the glucagon receptor. Alternatively or additionally, the analog can comprise an amino acid modification at position 7 (e.g., an amino acid substitution of Thr with an amino acid lacking a hydroxyl group, e.g., Abu or Ile), a deletion of the amino acid(s) C-terminal to the amino acid at position 27 or 28, yielding a 27- or 28-amino acid peptide, or a combination thereof, wherein the analog has less than about 10% of the activity of GLP-1 at the GLP-1 receptor.

[0722] With regard to the exemplary embodiments, the analog can be covalently linked to a hydrophilic moiety. In some embodiments, the analog is covalently linked to the hydrophilic moiety at any of amino acid positions 16, 17, 20, 21, 24, 29, 40, or the C-terminus In certain embodiments, the analog comprises a C-terminal extension (e.g., an amino acid sequence of SEQ ID NO: 1095) and an addition of an amino acid comprising the hydrophilic moiety, such that the hydrophilic moiety is covalently linked to the analog at position 40.

[0723] In some embodiments, the hydrophilic moiety is covalently linked to a Lys, Cys, Orn, homocysteine, or acetyl-phenylalanine of the analog. The Lys, Cys, Orn, homocysteine, or acetyl-phenylalanine may be an amino acid that is native to the glucagon sequence (SEQ ID NO: 1001) or it may be an amino acid which is replacing a native amino acid of SEQ ID NO: 1001. In some embodiments, wherein the hydrophilic moiety is attached to a Cys, the linkage to the hydrophilic moiety can comprise the structure

[chemical structure]

[0724] With regard to the analogs comprising a hydrophilic moiety, the hydrophilic moiety may be any of those described herein. See, e.g., the teachings under the section “Linkage of hydrophilic moieties.” In some embodiments, the hydrophilic moiety is a polyethylene glycol (PEG). The PEG in certain embodiments has a molecular weight of about 1,000 Daltons to about 40,000 Daltons, e.g., about 20,000 Daltons to about 40,000 Daltons.

[0725] In the exemplary embodiments, wherein the analog comprises an acyl or alkyl group, which is attached to the analog via a spacer, the spacer can be any spacer as described herein. The spacer, for example, may be 3 to 10 atoms in length and may be, for instance, an amino acid (e.g., 6-amino hexanoic acid, any amino acid described herein), a dipeptide (e.g., Ala-Ala, βAla-βAla, Leu-Leu, Pro-Pro, γ-Glu-γ-Glu), a tripeptide, or a hydrophilic or hydrophobic bifunctional spacer. In certain aspects, the total length of the spacer and the acyl or alkyl group is about 14 to about 28 atoms. In some embodiments, the amino acid spacer is not γ-Glu. In some embodiments, the dipeptide spacer is not γ-Glu-γ-Glu.

[0726] The acyl or alkyl group is any acyl or alkyl group as described herein, such as an acyl or alkyl group which is non-native to a naturally occurring amino acid. The acyl or alkyl group in some embodiments is a C4 to C30 fatty acyl group, such as, for example, a C10 fatty acyl or alkyl group, a C12 fatty acyl or alkyl group, a C14 fatty acyl or alkyl group, a C16 fatty acyl or alkyl group, a C18 fatty acyl or alkyl group, a C20 acyl or alkyl group, or a C22 acyl or alkyl group, or a C4 to C30 alkyl group. In specific embodiments, the acyl group is a C12 to C18 fatty acyl group (e.g., a C14 or C16 fatty acyl group).

[0727] In some embodiments, the extension of about 1 to about 21 amino acids C-terminal to the amino acid at position 29 of the analog comprises the amino acid sequence of GPSSGAPPPS (SEQ ID NO: 1095) or XGPSSGAPPPS (SEQ ID NO: 1096), wherein X is any amino acid, or GPSSGAPPPK (SEQ ID NO: 1170) or XGPSSGAPPPK (SEQ ID NO: 1171) or XGPSSGAPPPSK (SEQ ID NO: 1172), wherein X is Gly or a small, aliphatic or non-polar or slightly polar amino acid. In some embodiments, the about 1 to about 21 amino acids may comprise sequences containing one or more conservative substitutions relative to SEQ ID NO: 1095, 1096, 1170, 1171 or 1172. In some embodiments, the acylated or alkylated amino acid is located at position 37, 38, 39, 40, 41, 42, or 43 of the C-terminally-extended analog. In certain embodiments, the acylated or alkylated amino acid is located at position 40 of the C-terminally extended analog.

[0728] The GIP agonist may be a peptide comprising the amino acid sequence of any of the amino acid sequences, e.g., SEQ ID NOs: 1005-1094, optionally with up to 1, 2, 3, 4, or 5 further modifications that retain GIP agonist activity. In certain embodiments, the GIP agonist comprises the amino acids of any of SEQ ID NOs: 1099-1275.

### Class 3 Glucagon Related Peptides

[0729] In certain embodiments, the glucagon related peptide is a Class 3 glucagon related peptide, which is described herein and in International Patent Application Publication Nos. WO 2009/155258, WO 2008/101017, and U.S. Provisional Application No. 61/288,248 (filed on Dec. 18, 2009) the contents of which are incorporated by reference in their entirety.

[0730] Some of the biological sequences referenced in the following section (SEQ ID NOs: 1-656) relating to Class 3 glucagon related peptides are correspond to SEQ ID NOs: 1-656 in International Patent Application Publication No. WO 2009/155258.

### Activity

[0731] The Class 3 glucagon related peptide can be a peptide that exhibits increased activity at the glucagon receptor, and in further embodiments exhibits enhanced biophysical stability and/or aqueous solubility. In addition, in some embodiments, the Class 3 glucagon related peptide has lost native glucagon's selectivity for the glucagon receptor verses the GLP-1 receptor, and thus represents co-agonists of those two receptors. Selected amino acid modifications within the Class 3 glucagon related peptide can control the relative activity of the peptide at the GLP-1 receptor verses the glucagon receptor. Thus, the Class 3 glucagon related peptide can be a glucagon/GLP-1 co-agonist that has higher activity at the glucagon receptor versus the GLP-1 receptor, a glucagon/GLP-1 co-agonist that has approximately equivalent activity at both receptors, or a glucagon/GLP-1 co-agonist that has higher activity at the GLP-1 receptor versus the glucagon receptor. The latter category of co-agonist can be engineered to exhibit little or no activity at the glucagon receptor, and yet retain ability to activate the GLP-1 receptor with the same or better potency than native GLP-1. Any of these co-agonists may also include modifications that confer enhanced biophysical stability and/or aqueous solubility.

[0732] Modifications of the Class 3 glucagon related peptide can be made to produce a glucagon peptide having anywhere from at least about 1% (including at least about 1.5%, 2%, 5%, 7%, 10%, 20%, 30%, 40%, 50%, 60%, 75%, 100%, 125%, 150%, 175%) to about 200% or higher activity at the GLP-1 receptor relative to native GLP-1 and anywhere from at least about 1% (including about 1.5%, 2%, 5%, 7%, 10%, 20%, 30%, 40%, 50%, 60%, 75%, 100%, 125%, 150%, 175%, 200%, 250%, 300%, 350%, 400%, 450%) to about 500% or higher activity at the glucagon receptor relative to native glucagon. The amino acid sequence of native glucagon is SEQ ID NO: 1, the amino acid sequence of GLP-1 (7-36)amide is SEQ ID NO: 52, and the amino acid sequence of GLP-1 (7-37) acid is SEQ ID NO: 50. In exemplary embodiments, a Class 3 glucagon related peptide may exhibit at least 10% of the activity of native glucagon at the glucagon receptor and at least 50% of the activity of native GLP-1 at the GLP-1 receptor, or at least 40% of the activity of native glucagon at the glucagon receptor and at least 40% of the activity of native GLP-1 at the GLP-1 receptor, or at least 60% of the activity of native glucagon at the glucagon receptor and at least 60% of the activity of native GLP-1 at the GLP-1 receptor.

[0733] Selectivity of a Class 3 glucagon related peptide for the glucagon receptor versus the GLP-1 receptor can be described as the relative ratio of glucagon/GLP-1 activity (the peptide's activity at the glucagon receptor relative to native glucagon, divided by the peptide's activity at the GLP-1 receptor relative to native GLP-1). For example, a Class 3 glucagon related peptide that exhibits 60% of the activity of native glucagon at the glucagon receptor and 60% of the activity of native GLP-1 at the GLP-1 receptor has a 1:1 ratio of glucagon/GLP-1 activity. Exemplary ratios of glucagon/GLP-1 activity include about 1:1, 1.5:1, 2:1, 3:1, 4:1, 5:1, 6:1, 7:1, 8:1, 9:1 or 10:1, or about 1:10, 1:9, 1:8, 1:7, 1:6, 1:5, 1:4, 1:3, 1:2, or 1:1.5. As an example, a glucagon/GLP-1 activity ratio of 10:1 indicates a 10-fold selectivity for the glucagon receptor versus the GLP-1 receptor. Similarly, a GLP-1/glucagon activity ratio of 10:1 indicates a 10-fold selectivity for the GLP-1 receptor versus the glucagon receptor.

[0734] In some embodiments, the Class 3 glucagon related peptides have about 10% or less of the activity of native glucagon at the glucagon receptor, e.g. about 1-10%, or about 0.1-10%, or greater than about 0.1% but less than about 10%, while exhibiting at least 20% of the activity of GLP-1 at the GLP-1 receptor. For example, exemplary Class 3 glucagon related peptides described herein have about 0.5%, about 1% or about 7% of the activity of native glucagon, while exhibiting at least 20% of the activity of GLP-1 at the GLP-1 receptor.

[0735] The Class 3 glucagon related peptide can be a glucagon peptide with increased or decreased activity at the glucagon receptor, or GLP-1 receptor, or both. The Class 3 glucagon related peptide can be a glucagon peptide with altered selectivity for the glucagon receptor versus the GLP-1 receptor.

[0736] Thus, as disclosed herein high potency Class 3 glucagon related peptides are provided that also exhibit improved solubility and/or stability. An exemplary high potency Class 3 glucagon related peptide exhibits at least about 200% of the activity of native glucagon at the glucagon receptor, and optionally is soluble at a concentration of at least 1 mg/mL at a pH between 6 and 8, or between 6 and 9, or between 7 and 9 (e.g. pH 7), and optionally retains at least 95% of the original peptide (e.g. 5% or less of the original peptide is degraded or cleaved) after 24 hours at 25° C. As another example, an exemplary Class 3 glucagon related peptide exhibits greater than about 40% or greater than about 60% activity at both the glucagon and the GLP-1 receptors (at a ratio between about 1:3 and 3:1, or between about 1:2 and 2:1), is optionally soluble at a concentration of at least 1 mg/mL at a pH between 6 and 8 or between 6 and 9, or between 7 and 9 (e.g. pH 7), and optionally retains at least 95% of the original peptide after 24 hours at 25° C. Another exemplary Class 3 glucagon related peptide exhibits about 175% or more of the activity of native glucagon at the glucagon receptor and about 20% or less of the activity of native GLP-1 at the GLP-1 receptor, is optionally soluble at a concentration of at least 1 mg/mL at a pH between 6 and 8 or between 6 and 9, or between 7 and 9 (e.g. pH 7), and optionally retains at least 95% of the original peptide after 24 hours at 25° C. Yet another exemplary Class 3 glucagon related peptide exhibits about 10% or less of the activity of native glucagon at the glucagon receptor and at least about 20% of the activity of native GLP-1 at the GLP-1 receptor, is optionally soluble at a concentration of at least 1 mg/mL at a pH between 6 and 8 or between 6 and 9, or between 7 and 9 (e.g. pH 7), and optionally retains at least 95% of the original peptide after 24 hours at 25° C. Yet another exemplary Class 3 glucagon related peptide exhibits about 10% or less but above 0.1%, 0.5% or 1% of the activity of native glucagon at the glucagon receptor and at least about 50%, 60%, 70%, 80%, 90% or 100% or more of the activity of native GLP-1 at the GLP-1 receptor, is optionally soluble at a concentration of at least 1 mg/mL at a pH between 6 and 8 or between 6 and 9, or between 7 and 9 (e.g. pH 7), and optionally retains at least 95% of the original peptide after 24 hours at 25° C. In some embodiments, such Class 3 glucagon related peptides retain at least 22, 23, 24, 25, 26, 27 or 28 of the naturally occurring amino acids at the corresponding positions in native glucagon (e.g. have 1-7, 1-5 or 1-3 modifications relative to naturally occurring glucagon).

### Modifications Affecting Glucagon Activity

[0737] Increased activity at the glucagon receptor is provided by an amino acid modification at position 16 of native glucagon (SEQ ID NO: 1). In some embodiments, the Class 3 glucagon related peptide is a glucagon agonist that has been modified relative to the wild type peptide of His-Ser-Gln-Gly-Thr-Phe-Thr-Ser-Asp-Tyr-Ser-Lys-Tyr-Leu-Asp-Ser-Arg-Arg-Ala-Gln-Asp-Phe-Val-Gln-Trp-Leu-Met-Asn-Thr (SEQ ID NO: 1) to enhance the peptide's potency at the glucagon receptor. The normally occurring serine at position 16 of native glucagon (SEQ ID NO: 1) can be substituted with select acidic amino acids to enhance the potency of glucagon, in terms of its ability to stimulate cAMP synthesis in a validated in vitro model assay (see Example 2). More particularly, this substitution enhances the potency of the analog at least 2-fold, 4-fold, 5-fold, and up to 10-fold greater at the glucagon receptor. This substitution also enhances the analog's activity at the GLP-1 receptor at least 5-fold, 10-fold, or 15-fold relative to native glucagon, but selectivity is maintained for the glucagon receptor over the GLP-1 receptor.

[0738] By way of nonlimiting example, such enhanced potency can be provided by substituting the naturally occurring serine at position 16 with glutamic acid or with another negatively charged amino acid having a side chain with a length of 4 atoms, or alternatively with any one of glutamine, homoglutamic acid, or homocysteic acid, or a charged amino acid having a side chain containing at least one heteroatom, (e.g. N, O, S, P) and with a side chain length of about 4 (or 3-5) atoms. In accordance with some embodiments, the serine residue at position 16 of native glucagon is substituted with an amino acid selected from the group consisting of glutamic acid, glutamine, homoglutamic acid, homocysteic acid, threonine, or glycine. In accordance with some embodiments, the serine residue at position 16 of native glucagon is substituted with an amino acid selected from the group consisting of glutamic acid, glutamine, homoglutamic acid and homocysteic acid, and in some embodiments the serine residue is substituted with glutamic acid.

[0739] In some embodiments, the enhanced potency Class 3 glucagon related peptide comprises a peptide of SEQ ID NO: 2, SEQ ID NO: 3, SEQ ID NO: 4, SEQ ID NO: 5, SEQ ID NO: 6, SEQ ID NO: 7 or a glucagon agonist analog of SEQ ID NO: 5. In accordance with some embodiments, a Class 3 glucagon related peptide having enhanced potency at the glucagon receptor relative to wild type glucagon is provided wherein the peptide comprises the sequence of SEQ ID NO: 7, SEQ ID NO: 8, SEQ ID NO: 9 or SEQ ID NO: 10, wherein the glucagon peptide retains its selectivity for the glucagon receptor relative to the GLP-1 receptors. In some embodiments, the Class 3 glucagon related peptide having enhanced specificity for the glucagon receptor comprises the peptide of SEQ ID NO: 8, SEQ ID NO: 9, SEQ ID NO: 10 or a glucagon agonist analog thereof, wherein the carboxy terminal amino acid retains its native carboxylic acid group. In accordance with some embodiments, a Class 3 glucagon related peptide comprises the sequence of NH₂-His-Ser-Gln-Gly-Thr-Phe-Thr-Ser-Asp-Tyr-Ser-Lys-Tyr-Leu-Asp-Glu-Arg-Arg-Ala-Gln-Asp-Phe-Val-Gln-Trp-Leu-Met-Asn-Thr-COOH (SEQ ID NO: 10), wherein the peptide exhibits approximately fivefold enhanced potency at the glucagon receptor, relative to native glucagon as measured by the in vitro cAMP assay of Example 2.

[0740] Glucagon receptor activity can be reduced, maintained, or enhanced by an amino acid modification at position 3, e.g. substitution of the naturally occurring glutamine at position 3. In some embodiments, substitution of the amino acid at position 3 with an acidic, basic, or hydrophobic amino acid (glutamic acid, ornithine, norleucine) has been shown to substantially reduce or destroy glucagon receptor activity. The analogs that are substituted with, for example, glutamic acid, ornithine, or norleucine have about 10% or less of the activity of native glucagon at the glucagon receptor, e.g. about 1-10%, or about 0.1-10%, or greater than about 0.1% but less than about 10%, while exhibiting at least 20% of the activity of GLP-1 at the GLP-1 receptor. For example, exemplary analogs described herein have about 0.5%, about 1% or about 7% of the activity of native glucagon, while exhibiting at least 20% of the activity of GLP-1 at the GLP-1 receptor. In particular, any of the Class 3 glucagon related peptides, including glucagon analogs, glucagon agonist analogs, glucagon co-agonists, and glucagon/GLP-1 co-agonist molecules, described herein may be modified to contain a modification at position 3, e.g., Gln substituted with Glu, to produce a peptide with high selectivity, e.g., tenfold selectivity, for the GLP-1 receptor as compared to the selectivity for the glucagon receptor.

[0741] In another embodiment, the naturally occurring glutamine at position 3 of any of the Class 3 glucagon peptides can be substituted with a glutamine analog without a substantial loss of activity at the glucagon receptor, and in some cases, with an enhancement of glucagon receptor activity, as described herein. In specific embodiments, the amino acid at position 3 is substituted with Dab(Ac). For example, glucagon agonists can comprise the amino acid sequence of SEQ ID NO: 595, SEQ ID NO: 601 SEQ ID NO: 603, SEQ ID NO: 604, SEQ ID NO: 605, and SEQ ID NO: 606.

[0742] It was observed that modifications at position 2 (e.g. Aib at position 2) and in some cases modifications at position 1 may reduce glucagon activity. This reduction in glucagon activity can be restored by stabilizing the alpha-helix in the C-terminal portion of glucagon, e.g. through means described herein, for example, through a covalent bond between the side chains of the amino acids at positions “i” and “i+4”, e.g., 12 and 16, 16 and 20, or 20 and 24. In some embodiments, this covalent bond is a lactam bridge between a glutamic acid at position 16 and a lysine at position 20. In some embodiments, this covalent bond is an intramolecular bridge other than a lactam bridge. For example, suitable covalent bonding methods include any one or more of olefin metathesis, lanthionine-based cyclization, disulfide bridge or modified sulfur-containing bridge formation, the use of α,ω-diaminoalkane tethers, the formation of metal-atom bridges, and other means of peptide cyclization.

### Modifications Affecting GLP-1 Activity

[0743] Enhanced activity at the GLP-1 receptor is provided by replacing the carboxylic acid of the C-terminal amino acid with a charge-neutral group, such as an amide or ester. In some embodiments, these Class 3 glucagon related peptides comprise a sequence of SEQ ID NO: 20, wherein the carboxy terminal amino acid has an amide group in place of the carboxylic acid group found on the native amino acid. These Class 3 glucagon related peptides have strong activity at both the glucagon and GLP-1 receptors and thus act as co-agonists at both receptors. In accordance with some embodiments, the Class 3 glucagon related peptide is a glucagon and GLP-1 receptor co-agonist, wherein the peptide comprises the sequence of SEQ ID NO: 20, wherein the amino acid at position 28 is Asn or Lys and the amino acid at position 29 is Thr-amide

[0744] Increased activity at the GLP-1 receptor is provided by modifications that stabilize the alpha helix in the C-terminal portion of glucagon (e.g. around residues 12-29).

[0745] In some embodiments, such modifications permit formation of an intramolecular bridge between the side chains of two amino acids that are separated by three intervening amino acids (i.e., an amino acid at position “i” and an amino acid at position “i+4”, wherein i is any integer between 12 and 25), by two intervening amino acids, i.e., an amino acid at position “j” and an amino acid at position “j+3,” wherein j is any integer between 12 and 27, or by six intervening amino acids, i.e., an amino acid at position “k” and an amino acid at position “k+7,” wherein k is any integer between 12 and 22. In exemplary embodiments, the bridge or linker is about 8 (or about 7-9) atoms in length and forms between side chains of amino acids at positions 12 and 16, or at positions 16 and 20, or at positions 20 and 24, or at positions 24 and 28. The two amino acid side chains can be linked to one another through non-covalent bonds, e.g., hydrogen-bonding, ionic interactions, such as the formation of salt bridges, or by covalent bonds.

[0746] In accordance with some embodiments, the Class 3 glucagon related peptide exhibits glucagon/GLP-1 receptor co-agonist activity and comprises an amino acid sequence selected from the group consisting of SEQ ID NO: 11, 47, 48 and 49. In some embodiments, the side chains are covalently bound to one another, and in some embodiments the two amino acids are bound to one another to form a lactam ring.

[0747] In accordance with some embodiments, the Class 3 glucagon related peptide comprises SEQ ID NO: 45, wherein at least one lactam ring is formed between the side chains of an amino acid pair selected from the group consisting of amino acid pairs 12 and 16, 16 and 20, and 24 or 24 and 28. In some embodiments, the Class 3 glucagon related peptide comprises a glucagon peptide analog of SEQ ID NO: 20, wherein the peptide comprises an intramolecular lactam bridge formed between amino acid positions 12 and 16 or between amino acid positions 16 and 20. In some embodiments, the Class 3 glucagon related peptide comprises the sequence of SEQ ID NO: 20, wherein an intramolecular lactam bridge is formed between amino acid positions 12 and 16, between amino acid positions 16 and 20, or between amino acid positions 20 and 24 and the amino acid at position 29 is glycine, wherein the sequence of SEQ ID NO: 29 is linked to the C-terminal amino acid of SEQ ID NO: 20. In a further embodiment, the amino acid at position 28 is aspartic acid.

[0748] In some specific embodiments, stabilization of the alpha helix structure in the C-terminal portion of the Class 3 glucagon related peptide is achieved through the formation of an intramolecular bridge other than a lactam bridge. For example, suitable covalent bonding methods include any one or more of olefin metathesis, lanthionine-based cyclization, disulfide bridge or modified sulfur-containing bridge formation, the use of α,ω-diaminoalkane tethers, the formation of metal-atom bridges, and other means of peptide cyclization are used to stabilize the alpha helix.

[0749] Furthermore, enhanced activity at the GLP-1 receptor may be achieved by stabilizing the alpha-helix structure in the C-terminal portion of the glucagon peptide (around amino acids 12-29) through purposeful introduction of one or more α,α-disubstituted amino acids at positions that retain the desired activity. Such peptides may be considered herein as a peptide lacking an intramolecular bridge. In some aspects, stabilization of the alpha-helix is accomplished in this manner without introduction of an intramolecular bridge such as a salt bridge or covalent bond. In some embodiments, one, two, three, four or more of positions 16, 17, 18, 19, 20, 21, 24 or 29 of a glucagon peptide is substituted with an α,α-disubstituted amino acid. For example, substitution of position 16 of the Class 3 glucagon related peptide with amino iso-butyric acid (Aib) enhances GLP-1 activity, in the absence of a salt bridge or lactam. In some embodiments, one, two, three or more of positions 16, 20, 21 or 24 are substituted with Aib.

[0750] Enhanced activity at the GLP-1 receptor may be achieved by an amino acid modification at position 20. In some embodiments, the glutamine at position 20 is replaced with another hydrophilic amino acid having a side chain that is either charged or has an ability to hydrogen-bond, and is at least about 5 (or about 4-6) atoms in length, for example, lysine, citrulline, arginine, or ornithine.

[0751] Increased activity at the GLP-1 receptor is demonstrated in Class 3 glucagon related peptides comprising the C-terminal extension of SEQ ID NO: 26. GLP-1 activity in such Class 3 glucagon related peptides comprising SEQ ID NO: 26 can be further increased by modifying the amino acid at position 18, 28 or 29, or at position 18 and 29, as described herein.

[0752] A further modest increase in GLP-1 potency may be achieved by modifying the amino acid at position 10 to be Trp.

[0753] Combinations of the modifications that increase GLP-1 receptor activity may provide higher GLP-1 activity than any of such modifications taken alone. For example, the Class 3 glucagon related peptides can comprise modifications at position 16, at position 20, and at the C-terminal carboxylic acid group, optionally with a covalent bond between the amino acids at positions 16 and 20; can comprise modifications at position 16 and at the C-terminal carboxylic acid group; can comprise modifications at positions 16 and 20, optionally with a covalent bond between the amino acids at positions 16 and 20; or can comprise modifications at position 20 and at the C-terminal carboxylic acid group; optionally with the proviso that the amino acid at position 12 is not Arg; or optionally with the proviso that the amino acid at position 9 is not Glu.

### Modifications Affecting Solubility

[0754] Addition of Hydrophilic Moieties

[0755] The Class 3 glucagon related peptides can be further modified to improve the peptide's solubility and stability in aqueous solutions at physiological pH, while retaining the high biological activity relative to native glucagon. Hydrophilic moieties as discussed herein can be attached to the Class 3 glucagon related peptide as further discussed herein.

[0756] In accordance with some embodiments, introduction of hydrophilic groups at positions 17, 21, and 24 of the Class 3 glucagon related peptide comprising SEQ ID NO: 9 or SEQ ID NO: 10 are anticipated to improve the solubility and stability of the high potency glucagon analog in solutions having a physiological pH. Introduction of such groups also increases duration of action, e.g. as measured by a prolonged half-life in circulation.

[0757] In some embodiments, the Class 3 glucagon related peptide comprises a sequence selected from the group consisting of SEQ ID NO: 11, SEQ ID NO: 12, SEQ ID NO: 13, SEQ ID NO: 14, SEQ ID NO: 15, SEQ ID NO: 16, SEQ ID NO: 17, SEQ ID NO: 18 and SEQ ID NO: 19, wherein the side chain of an amino acid residue at one of position 16, 17, 21 or 24 of said Class 3 glucagon related peptide further comprises a polyethylene glycol chain, having a molecular weight selected from the range of about 500 to about 40,000 Daltons. In some embodiments, the polyethylene glycol chain has a molecular weight selected from the range of about 500 to about 5,000 Daltons. In another embodiment. the polyethylene glycol chain has a molecular weight of about 10,000 to about 20,000 Daltons. In yet other exemplary embodiments the polyethylene glycol chain has a molecular weight of about 20,000 to about 40,000 Daltons.

[0758] Suitable hydrophilic moieties include any water soluble polymers known in the art, including the hydrophilic moieties described herein, homo- or co-polymers of PEG, and a monomethyl-substituted polymer of PEG (mPEG). In accordance with some embodiments the hydrophilic group comprises a polyethylene (PEG) chain. More particularly, in some embodiments, the Class 3 glucagon related peptide comprises the sequence of SEQ ID NO: 6 or SEQ ID NO: 7 wherein a PEG chain is covalently linked to the side chains of amino acids present at positions 21 and 24 of the Class 3 glucagon related peptide and the carboxy terminal amino acid of the Class 3 glucagon related peptide has the carboxylic acid group. In accordance with some embodiments, the polyethylene glycol chain has an average molecular weight selected from the range of about 500 to about 10,000 Daltons.

[0759] In accordance with some embodiments, the pegylated Class 3 glucagon related peptide comprises two or more polyethylene glycol chains covalently bound to the Class 3 glucagon related peptide wherein the total molecular weight of the glucagon chains is about 1,000 to about 5,000 Daltons. In some embodiments the pegylated glucagon agonist comprises a peptide consisting of SEQ ID NO: 5 or a glucagon agonist analog of SEQ ID NO: 5, wherein a PEG chain is covalently linked to the amino acid residue at position 21 and at position 24, and wherein the combined molecular weight of the two PEG chains is about 1,000 to about 5,000 Daltons.

### Charged C-Terminus

[0760] The solubility of the Class 3 glucagon related peptide comprising SEQ ID NO: 20 can be further improved, for example, by introducing one, two, three or more charged amino acid(s) to the C-terminal portion of glucagon peptide of SEQ ID NO: 20, preferably at a position C-terminal to position 27. Such a charged amino acid can be introduced by substituting a native amino acid with a charged amino acid, e.g. at positions 28 or 29, or alternatively by adding a charged amino acid, e.g. after position 27, 28 or 29. In exemplary embodiments, one, two, three or all of the charged amino acids are negatively charged. Additional modifications, e.g. conservative substitutions, may be made to the Class 3 glucagon related peptide that still allow it to retain glucagon activity. In some embodiments, an analog of the Class 3 glucagon related peptide of SEQ ID NO: 20 is provided wherein the analog differs from SEQ ID NO: 20 by 1 to 2 amino acid substitutions at positions 17-26, and, in some embodiments, the analog differs from the peptide of SEQ ID NO: 20 by an amino acid substitution at position 20.

### Acylation/Alkylation

[0761] In accordance with some embodiments, the glucagon peptide is modified to comprise an acyl or alkyl group, e.g., a C₄ to C₃₀ acyl or alkyl group. In some aspects, the acyl group or alkyl group is not naturally occurring on an amino acid. In specific aspects, the acyl or alkyl group is non-native to any naturally-occurring amino acid. Acylation or alkylation can increase the half-life in circulation and/or delay the onset of and/or extend the duration of action and/or improve resistance to proteases such as DPP-IV. The activity at the glucagon receptor and GLP-1 receptor of the Class 3 glucagon related peptides is maintained, if not substantially enhanced after acylation Further, the potency of the acylated analogs were comparable to the unacylated versions of the Class 3 glucagon related peptides, if not substantially enhanced.

[0762] In some embodiments, the invention provides a Class 3 glucagon related peptide modified to comprise an acyl group or alkyl group covalently linked to the amino acid at position 10 of the glucagon peptide. The glucagon peptide may further comprise a spacer between the amino acid at position 10 of the Class 3 glucagon related peptide and the acyl group or alkyl group. Any of the foregoing Class 3 glucagon related peptides may comprise two acyl groups or two alkyl groups, or a combination thereof.

[0763] In a specific aspect of the invention, the acylated Class 3 glucagon related peptide comprises the amino acid sequence of any of SEQ ID NOs: 534-544 and 546-549.

### C-Terminal Truncation

[0764] In some embodiments, the Class 3 glucagon related peptides described herein are further modified by truncation or deletion of one or two amino acids of the C-terminus of the glucagon peptide (i.e., position 29 and/or 28) without affecting activity and/or potency at the glucagon and GLP-1 receptors. In this regard, the Class 3 glucagon related peptide can comprise amino acids 1-27 or 1-28 of the native glucagon peptide (SEQ ID NO: 1), optionally with one or more modifications described herein.

[0765] In some embodiments, the truncated Class 3 glucagon related peptide comprises SEQ ID NO: 550 or SEQ ID NO: 551. In another embodiment, the truncated glucagon agonist peptide comprises SEQ ID NO: 552 or SEQ ID NO: 553.

### C-Terminal Extension

[0766] In accordance with some embodiments, the Class 3 glucagon related peptides disclosed herein are modified by the addition of a second peptide to the carboxy terminus of the glucagon peptide, for example, SEQ ID NO: 26, SEQ ID NO: 27 or SEQ ID NO: 28. In some embodiments, a Class 3 glucagon related peptide having a sequence selected from the group consisting of SEQ ID NO: 11, SEQ ID NO: 12, SEQ ID NO: 13, SEQ ID NO: 14, SEQ ID NO: 15, SEQ ID NO: 16, SEQ ID NO: 17, SEQ ID NO: 18, SEQ ID NO: 19, SEQ ID NO: 66, SEQ ID NO: 67, SEQ ID NO: 68, and SEQ ID NO: 69 is covalently bound through a peptide bond to a second peptide, wherein the second peptide comprises a sequence selected from the group consisting of SEQ ID NO: 26, SEQ ID NO: 27 and SEQ ID NO: 28. In a further embodiment, in Class 3 glucagon related peptides which comprise the C-terminal extension, the threonine at position 29 of the native glucagon peptide is replaced with a glycine. A Class 3 glucagon related peptide having a glycine substitution for threonine at position 29 and comprising the carboxy terminal extension of SEQ ID NO: 26 is four times as potent at the GLP-1 receptor as native glucagon modified to comprise the carboxy terminal extension of SEQ ID NO: 26. Potency at the GLP-1 receptor can be further enhanced by an alanine substitution for the native arginine at position 18.

[0767] Accordingly, the Class 3 glucagon related peptide can have a carboxy terminal extension of SEQ ID NO: 27 (KRNRNNIA) or SEQ ID NO: 28. In accordance with some embodiments, Class 3 glucagon related peptide comprising SEQ ID NO: 33 or SEQ ID NO: 20, further comprises the amino acid sequence of SEQ ID NO: 27 (KRNRNNIA) or SEQ ID NO: 28 linked to amino acid 29 of the glucagon peptide. More particularly, the Class 3 glucagon related peptide comprises a sequence selected from the group consisting of SEQ ID NO: 10, SEQ ID NO: 12, SEQ ID NO: 13 SEQ ID NO: 14 and SEQ ID NO: 15, further comprising the amino acid sequence of SEQ ID NO: 27 (KRNRNNIA) or SEQ ID NO: 28 linked to amino acid 29 of the glucagon peptide. More particularly, the glucagon peptide comprises a sequence selected from the group consisting of SEQ ID NO: 10, SEQ ID NO: 12, SEQ ID NO: 13 SEQ ID NO: 14, SEQ ID NO: 15, SEQ ID NO: 16, SEQ ID NO: 17, SEQ ID NO: 18, SEQ ID NO: 66, SEQ ID NO: 67, SEQ ID NO: 68, SEQ ID NO: 69, SEQ ID NO: 55 and SEQ ID NO: 56 further comprising the amino acid sequence of SEQ ID NO: 26 (GPSSGAPPPS) or SEQ ID NO: 29 linked to amino acid 29 of the Class 3 glucagon related peptide. In some embodiments, the Class 3 glucagon related peptide comprises the sequence of SEQ ID NO: 64.

### Other Modifications

[0768] Any of the modifications described above with regard to Class 3 glucagon related peptides which increase or decrease glucagon receptor activity and which increase GLP-1 receptor activity can be applied individually or in combination. Combinations of the modifications that increase GLP-1 receptor activity generally provide higher GLP-1 activity than any of such modifications taken alone. Any of the modifications described above can also be combined with other modifications described herein in reference to Class 3 glucagon related peptides that confer other desirable properties, such as increased solubility and/or stability and/or duration of action. Alternatively, any of the modifications described above can be combined with other modifications described herein in reference to Class 3 glucagon related peptides that do not substantially affect solubility or stability or activity. Exemplary modifications include but are not limited to:

[0769] (A) Improving solubility, for example, by introducing one, two, three or more charged amino acid(s) to the C-terminal portion of native glucagon, preferably at a position C-terminal to position 27. Such a charged amino acid can be introduced by substituting a native amino acid with a charged amino acid, e.g. at positions 28 or 29, or alternatively by adding a charged amino acid, e.g. after position 27, 28 or 29. In exemplary embodiments, one, two, three or all of the charged amino acids are negatively charged. In other embodiments, one, two, three or all of the charged amino acids are positively charged. Such modifications increase solubility, e.g. provide at least 2-fold, 5-fold, 10-fold, 15-fold, 25-fold, 30-fold or greater solubility relative to native glucagon at a given pH between about 5.5 and 8, e.g., pH 7, when measured after 24 hours at 25° C.

[0770] (B) Increasing solubility and duration of action or half-life in circulation by addition of a hydrophilic moiety such as a polyethylene glycol chain, as described herein, e.g. at position 16, 17, 20, 21, 24 or 29, or at the C-terminal amino acid of the peptide.

[0771] (C) Increasing stability by modification of the aspartic acid at position 15, for example, by deletion or substitution with glutamic acid, homoglutamic acid, cysteic acid or homocysteic acid. Such modifications can reduce degradation or cleavage at a pH within the range of 5.5 to 8, especially in acidic or alkaline buffers, for example, retaining at least 75%, 80%, 90%, 95%, 96%, 97%, 98% or 99% of the original peptide after 24 hours at 25° C.

[0772] (D) Increasing stability by modification of the methionine at position 27, for example, by substitution with leucine or norleucine. Such modifications can reduce oxidative degradation. Stability can also be increased by modification of the Gln at position 20 or 24, e.g. by substitution with Ser, Thr, Ala or Aib. Such modifications can reduce degradation that occurs through deamidation of Gln. Stability can be increased by modification of Asp at position 21, e.g. by substitution with Glu. Such modifications can reduce degradation that occurs through dehydration of Asp to form a cyclic succinimide intermediate followed by isomerization to iso-aspartate.

[0773] (E) Increasing resistance to dipeptidyl peptidase IV (DPP IV) cleavage by modification of the amino acid at position 1 or 2 with the DPP-IV resistant amino acids described herein and including modification of the amino acid at position 2 with N-methyl-alanine.

[0774] (F) Conservative or non-conservative substitutions, additions or deletions that do not affect activity, for example, conservative substitutions at one or more of positions 2, 5, 7, 10, 11, 12, 13, 14, 16, 17, 18, 19, 20, 21, 24, 27, 28 or 29; deletions at one or more of positions 27, 28 or 29; or a deletion of amino acid 29 optionally combined with a C-terminal amide or ester in place of the C-terminal carboxylic acid group;

[0775] (G) Adding C-terminal extensions as described herein;

[0776] (H) Increasing half-life in circulation and/or extending the duration of action and/or delaying the onset of action, for example, through acylation or alkylation of the glucagon peptide, as described herein;

[0777] (I) Homodimerization or heterodimerization as described herein.

[0778] Other modifications include substitution of His at position 1 with a large, aromatic amino acid (e.g., Tyr, Phe, Trp or amino-Phe); Ser at position 2 with Ala; substitution of Tyr at position 10 with Val or Phe; substitution of Lys at position 12 with Arg; substitution of Asp at position 15 with Glu; substitution of Ser at position 16 with Thr or Aib.

[0779] Class 3 glucagon related peptides with GLP-1 activity that contain a non-conservative substitution of His at position 1 with a large, aromatic amino acid (e.g., Tyr) can retain GLP-1 activity provided that the alpha-helix is stabilized via an intramolecular bridge, e.g., such as any of those described herein.

### Conjugates and Fusions

[0780] The Class 3 glucagon related peptide can be linked, optionally via covalent bonding and optionally via a linker, to a conjugate moiety.

[0781] The Class 3 glucagon related peptide also can be part of a fusion peptide or protein wherein a second peptide or polypeptide has been fused to a terminus, e.g., the carboxy terminus of the Class 3 glucagon related peptide.

[0782] More particularly, the fusion Class 3 glucagon related peptide may comprise a glucagon agonist of SEQ ID NO: 55, SEQ ID NO: 9 or SEQ ID NO: 10 further comprising an amino acid sequence of SEQ ID NO: 26 (GPSSGAPPPS), SEQ ID NO: 27 (KRNRNNIA) or SEQ ID NO: 28 (KRNR) linked to amino acid 29 of the glucagon peptide. In some embodiments, the amino acid sequence of SEQ ID NO: 26 (GPSSGAPPPS), SEQ ID NO: 27 (KRNRNNIA) or SEQ ID NO: 28 (KRNR) is bound to amino acid 29 of the Class 3 glucagon related peptide through a peptide bond. Applicants have discovered that in Class 3 glucagon related peptide fusion peptides comprising the C-terminal extension peptide of Exendin-4 (e.g., SEQ ID NO: 26 or SEQ ID NO: 29), substitution of the native threonine residue at position 29 with glycine dramatically increases GLP-1 receptor activity. This amino acid substitution can be used in conjunction with other modifications disclosed herein with regard to Class 3 glucagon related peptides to enhance the affinity of the glucagon analogs for the GLP-1 receptor. For example, the T29G substitution can be combined with the S16E and N20K amino acid substitutions, optionally with a lactam bridge between amino acids 16 and 20, and optionally with addition of a PEG chain as described herein. In some embodiments, a Class 3 glucagon related peptide comprises the sequence of SEQ ID NO: 64. In some embodiments, the Class 3 glucagon related peptide portion of the glucagon fusion peptide is selected from the group consisting of SEQ ID NO: 55, SEQ ID NO: 2, SEQ ID NO: 3, SEQ ID NO: 4, and SEQ ID NO: 5 wherein a PEG chain, when present at positions 17, 21, 24, or the C-terminal amino acid, or at both 21 and 24, is selected from the range of 500 to 40,000 Daltons. More particularly, in some embodiments, the Class 3 glucagon related peptide segment is selected from the group consisting of SEQ ID NO: 7, SEQ ID NO: 8, and SEQ ID NO: 63, wherein the PEG chain is selected from the range of 500 to 5,000. In some embodiments, the Class 3 glucagon related peptide is a fusion peptide comprising the sequence of SEQ ID NO: 55 and SEQ ID NO: 65 wherein the peptide of SEQ ID NO: 65 is linked to the carboxy terminus of SEQ ID NO: 55.

[0783] In accordance with some embodiments, an additional chemical modification of the Class 3 glucagon related peptide of SEQ ID NO: 10 bestows increased GLP-1 receptor potency to a point where the relative activity at the glucagon and GLP-1 receptors is virtually equivalent. Accordingly, in some embodiments, a Class 3 glucagon related peptide comprises a terminal amino acid comprising an amide group in place of the carboxylic acid group that is present on the native amino acid. The relative activity of the Class 3 glucagon related peptide at the respective glucagon and GLP-1 receptors can be adjusted by further modifications to the Class 3 glucagon related peptide to produce analogs demonstrating about 40% to about 500% or more of the activity of native glucagon at the glucagon receptor and about 20% to about 200% or more of the activity of native GLP-1 at the GLP-1 receptor, e.g. 50-fold, 100-fold or more increase relative to the normal activity of glucagon at the GLP-1 receptor. In some embodiments, the glucagon peptides described herein exhibit up to about 100%, 1000%, 10,000%, 100,000%, or 1,000,000% of the activity of native glucagon at the glucagon receptor. In some embodiments, the glucagon peptides described herein exhibit up to about 100%, 1000%, 10,000%, 100,000%, or 1,000,000% of the activity of native GLP-1 at the GLP-1 receptor.

### Exemplary Embodiments

[0784] In accordance with some embodiments, a glucagon analog is provided comprising the sequence of SEQ ID NO: 55, wherein said analog differs from SEQ ID NO: 55 by 1 to 3 amino acids, selected from positions 1, 2, 3, 5, 7, 10, 11, 13, 14, 17, 18, 19, 21, 24, 27, 28, and 29, wherein said glucagon peptide exhibits at least 20% of the activity of native GLP-1 at the GLP-1 receptor.

[0785] In accordance with some embodiments a glucagon/GLP-1 receptor co-agonist is provided comprising the sequence:

[0786] NH₂-His-Ser-Gln-Gly-Thr-Phe-Thr-Ser-Asp-Tyr-Ser-Lys-Tyr-Leu-Xaa-Xaa-Arg-Arg-Ala-Xaa-Asp-Phe-Val-Xaa-Trp-Leu-Met-Xaa-Xaa-R (SEQ ID NO: 33) wherein the Xaa at position 15 is selected from the group of amino acids consisting of Asp, Glu, cysteic acid, homoglutamic acid and homocysteic acid, Xaa at position 16 is selected from the group of amino acids consisting of Ser, Glu, Gln, homoglutamic acid and homocysteic acid, the Xaa at position 20 is Gln or Lys, the Xaa at position 24 is Gln or Glu, the Xaa at position 28 is Asn, Lys or an acidic amino acid, the Xaa at position 29 is Thr, Gly or an acidic amino acid, and R is COOH or CONH₂, with the proviso that when position 16 is serine, position 20 is Lys, or alternatively when position 16 is serine the position 24 is Glu and either position 20 or position 28 is Lys. In some embodiments the glucagon/GLP-1 receptor co-agonist comprises the sequence of SEQ ID NO: 33 wherein the amino acid at position 28 is aspartic acid and the amino acid at position 29 is glutamic acid. In another embodiment the amino acid at position 28 is the native asparagine, the amino acid at position 29 is glycine and the amino acid sequence of SEQ ID NO: 29 or SEQ ID NO: 65 is covalently linked to the carboxy terminus of SEQ ID NO: 33.

[0787] In some embodiments a co-agonist is provided comprising the sequence of SEQ ID NO: 33 wherein an additional acidic amino acid added to the carboxy terminus of the peptide. In a further embodiment the carboxy terminal amino acid of the glucagon analog has an amide in place of the carboxylic acid group of the natural amino acid. In some embodiments the glucagon analog comprises a sequence selected from the group consisting of SEQ ID NO: 40, SEQ ID NO: 41, SEQ ID NO: 42, SEQ ID NO: 43 and SEQ ID NO: 44.

[0788] In accordance with some embodiments a glucagon peptide analog of SEQ ID NO: 33 is provided, wherein said analog differs from SEQ ID NO: 33 by 1 to 3 amino acids, selected from positions 1, 2, 3, 5, 7, 10, 11, 13, 14, 17, 18, 19, 21 and 27, with the proviso that when the amino acid at position 16 is serine, either position 20 is lysine, or a lactam bridge is formed between the amino acid at position 24 and either the amino acid at position 20 or position 28. In accordance with some embodiments the analog differs from SEQ ID NO: 33 by 1 to 3 amino acids selected from positions 1, 2, 3, 21 and 27. In some embodiments the glucagon peptide analog of SEQ ID NO: 33 differs from that sequence by 1 to 2 amino acids, or in some embodiments by a single amino acid, selected form positions 1, 2, 3, 5, 7, 10, 11, 13, 14, 17, 18, 19, 21 and 27, with the proviso that when the amino acid at position 16 is serine, either position 20 is lysine, or a lactam bridge is formed between the amino acid at position 24 and either the amino acid at position 20 or position 28.

[0789] In accordance with another embodiment a relatively selective GLP-1 receptor agonist is provided comprising the sequence NH₂-His-Ser-Xaa-Gly-Thr-Phe-Thr-Ser-Asp-Tyr-Ser-Lys-Tyr-Leu-Xaa-Xaa-Arg-Arg-Ala-Xaa-Asp-Phe-Val-Xaa-Trp-Leu-Met-Xaa-Xaa-R (SEQ ID NO: 53) wherein the Xaa at position 3 is selected from the group of amino acids consisting of Glu, Orn or Nle, the Xaa at position 15 is selected from the group of amino acids consisting of Asp, Glu, cysteic acid, homoglutamic acid and homocysteic acid, Xaa at position 16 is selected from the group of amino acids consisting of Ser, Glu, Gln, homoglutamic acid and homocysteic acid, the Xaa at position 20 is Gln or Lys, the Xaa at position 24 is Gln or Glu, the Xaa at position 28 is Asn, Lys or an acidic amino acid, the Xaa at position 29 is Thr, Gly or an acidic amino acid, and R is COOH, CONH₂, SEQ ID NO: 26 or SEQ ID NO: 29, with the proviso that when position 16 is serine, position 20 is Lys, or alternatively when position 16 is serine the position 24 is Glu and either position 20 or position 28 is Lys. In some embodiments the amino acid at position 3 is glutamic acid. In some embodiments the acidic amino acid substituted at position 28 and/or 29 is aspartic acid or glutamic acid. In some embodiments the glucagon peptide, including a co-agonist peptide, comprises the sequence of SEQ ID NO: 33 further comprising an additional acidic amino acid added to the carboxy terminus of the peptide. In a further embodiment the carboxy terminal amino acid of the glucagon analog has an amide in place of the carboxylic acid group of the natural amino acid.

[0790] In accordance with some embodiments a glucagon/GLP-1 receptor co-agonist is provided comprising a modified glucagon peptide selected from the group consisting of:

[0791] NH₂-His-Ser-Gln-Gly-Thr-Phe-Thr-Ser-Asp-Tyr-Ser-Lys-Tyr-Leu-Xaa-Xaa-Arg-Arg-Ala-Xaa-Asp-Phe-Val-Xaa-Trp-Leu-Met-Xaa-Xaa-R (SEQ ID NO: 34), wherein the Xaa at position 15 is selected from the group of amino acids consisting of Asp, Glu, cysteic acid, homoglutamic acid and homocysteic acid, Xaa at position 16 is selected from the group of amino acids consisting of Ser, Glu, Gln, homoglutamic acid and homocysteic acid, the Xaa at position 20 is Gln or Lys, the Xaa at position 24 is Gln or Glu and the Xaa at position 28 is Asn, Asp or Lys, R is COOH or CONH₂, the Xaa at position 29 is Thr or Gly, and R is COOH, CONH₂, SEQ ID NO: 26 or SEQ ID NO: 29, with the proviso that when position 16 is serine, position 20 is Lys, or alternatively when position 16 is serine the position 24 is Glu and either position 20 or position 28 is Lys. In some embodiments R is CONH₂, the Xaa at position 15 is Asp, the Xaa at position 16 is selected from the group of amino acids consisting of Glu, Gln, homoglutamic acid and homocysteic acid, the Xaas at positions 20 and 24 are each Gln the Xaa at position 28 is Asn or Asp and the Xaa at position 29 is Thr. In some embodiments the Xaas at positions 15 and 16 are each Glu, the Xaas at positions 20 and 24 are each Gln, the Xaa at position 28 is Asn or Asp, the Xaa at position 29 is Thr and R is CONH₂.

[0792] It has been reported that certain positions of the native glucagon peptide can be modified while retaining at least some of the activity of the parent peptide. Accordingly, applicants anticipate that one or more of the amino acids located at positions at positions 2, 5, 7, 10, 11, 12, 13, 14, 17, 18, 19, 20, 21, 24, 27, 28 or 29 of the peptide of SEQ ID NO: 11 can be substituted with an amino acid different from that present in the native glucagon peptide, and still retain activity at the glucagon receptor. In some embodiments the methionine residue present at position 27 of the native peptide is changed to leucine or norleucine to prevent oxidative degradation of the peptide. In another embodiment the amino acid at position 20 is substituted with Lys, Arg, Orn or Citrullene and/or position 21 is substituted with Glu, homoglutamic acid or homocysteic acid.

[0793] In some embodiments a glucagon analog of SEQ ID NO: 20 is provided wherein 1 to 6 amino acids, selected from positions 1, 2, 5, 7, 10, 11, 13, 14, 17, 18, 19, 21, 27, 28 or 29 of the analog differ from the corresponding amino acid of SEQ ID NO: 1, with the proviso that when the amino acid at position 16 is serine, position 20 is Lys, or alternatively when position 16 is serine the position 24 is Glu and either position 20 or position 28 is Lys. In accordance with another embodiment a glucagon analog of SEQ ID NO: 20 is provided wherein 1 to 3 amino acids selected from positions 1, 2, 5, 7, 10, 11, 13, 14, 17, 18, 19, 20, 21, 27, 28 or 29 of the analog differ from the corresponding amino acid of SEQ ID NO: 1. In another embodiment, a glucagon analog of SEQ ID NO: 8, SEQ ID NO: 9 or SEQ ID NO: 11 is provided wherein 1 to 2 amino acids selected from positions 1, 2, 5, 7, 10, 11, 13, 14, 17, 18, 19, 20 or 21 of the analog differ from the corresponding amino acid of SEQ ID NO: 1, and in a further embodiment the one to two differing amino acids represent conservative amino acid substitutions relative to the amino acid present in the native glucagon sequence (SEQ ID NO: 1). In some embodiments a glucagon peptide of SEQ ID NO: 12, SEQ ID NO: 13, SEQ ID NO: 14 or SEQ ID NO: 15 is provided wherein the glucagon peptide further comprises one, two or three amino acid substitutions at positions selected from positions 2, 5, 7, 10, 11, 13, 14, 17, 18, 19, 20, 21, 27 or 29. In some embodiments the substitutions at positions 2, 5, 7, 10, 11, 13, 14, 16, 17, 18, 19, 20, 21, 27 or 29 are conservative amino acid substitutions.

[0794] In accordance with some embodiments a glucagon/GLP-1 receptor co-agonist is provided comprising a variant of the sequence of SEQ ID NO 33, wherein 1 to 10 amino acids selected from positions 16, 17, 18, 20, 21, 23, 24, 27, 28 and 29, respectively, of the variant differ from the corresponding amino acid of SEQ ID NO: 1. In accordance with some embodiments a variant of the sequence of SEQ ID NO 33 is provided wherein the variant differs from SEQ ID NO: 33 by one or more amino acid substitutions selected from the group consisting of Gln17, Ala18, Glu21, Ile23, Ala24, Val27 and Gly29. In accordance with some embodiments a glucagon/GLP-1 receptor co-agonist is provided comprising variants of the sequence of SEQ ID NO 33, wherein 1 to 2 amino acids selected from positions 17-26 of the variant differ from the corresponding amino acid of SEQ ID NO: 1. In accordance with some embodiments a variant of the sequence of SEQ ID NO 33 is provided wherein the variant differs from SEQ ID NO: 33 by an amino acid substitution selected from the group consisting of Gln17, Ala18, Glu21, Ile23 and Ala24. In accordance with some embodiments a variant of the sequence of SEQ ID NO 33 is provided wherein the variant differs from SEQ ID NO: 33 by an amino acid substitution at position 18 wherein the substituted amino acid is selected from the group consisting of Ala, Ser, Thr, and Gly. In accordance with some embodiments a variant of the sequence of SEQ ID NO 33 is provided wherein the variant differs from SEQ ID NO: 33 by an amino acid substitution of Ala at position 18. Such variations are encompassed by SEQ ID NO: 55. In another embodiment a glucagon/GLP-1 receptor co-agonist is provided comprising variants of the sequence of SEQ ID NO 33, wherein 1 to 2 amino acids selected from positions 17-22 of the variant differ from the corresponding amino acid of SEQ ID NO: 1, and in a further embodiment a variant of SEQ ID NO 33 is provided wherein the variant differs from SEQ ID NO: 33 by for 2 amino acid substitutions at positions 20 and 21. In accordance with some embodiments a glucagon/GLP-1 receptor co-agonist is provided comprising the sequence:

[0795] NH₂-His-Ser-Gln-Gly-Thr-Phe-Thr-Ser-Asp-Tyr-Ser-Lys-Tyr-Leu-Xaa-Xaa-Arg-Arg-Ala-Xaa-Xaa-Phe-Val-Xaa-Trp-Leu-Met-Xaa-Xaa-R (SEQ ID NO: 51), wherein the Xaa at position 15 is Asp, Glu, cysteic acid, homoglutamic acid or homocysteic acid, the Xaa at position 16 is Ser, Glu, Gln, homoglutamic acid or homocysteic acid, the Xaa at position 20 is Gln, Lys, Arg, Orn or citrulline, the Xaa at position 21 is Asp, Glu, homoglutamic acid or homocysteic acid, the Xaa at position 24 is Gln or Glu, the Xaa at position 28 is Asn, Lys or an acidic amino acid, the Xaa at position 29 is Thr or an acid amino acid and R is COOH or CONH₂. In some embodiments R is CONH₂. In accordance with some embodiments a glucagon/GLP-1 receptor co-agonist is provided comprising a variant of SEQ ID NO: 11, SEQ ID NO: 12, SEQ ID NO: 13, SEQ ID NO: 14, SEQ ID NO: 15, SEQ ID NO: 47, SEQ ID NO: 48 or SEQ ID NO: 49, wherein the variant differs from said sequence by an amino acid substitution at position 20. In some embodiments the amino acid substitution is selected form the group consisting of Lys, Arg, Orn or citrulline for position 20.

[0796] In some embodiments a glucagon agonist is provided comprising an analog peptide of SEQ ID NO: 34 wherein the analog differs from SEQ ID NO: 34 by having an amino acid other than serine at position 2. In some embodiments the serine residue is substituted with aminoisobutyric acid, D-alanine, and in some embodiments the serine residue is substituted with aminoisobutyric acid. Such modifications suppresses cleavage by dipeptidyl peptidase IV while retaining the inherent potency of the parent compound (e.g. at least 75, 80, 85, 90, 95% or more of the potency of the parent compound). In some embodiments the solubility of the analog is increased, for example, by introducing one, two, three or more charged amino acid(s) to the C-terminal portion of native glucagon, preferably at a position C-terminal to position 27. In exemplary embodiments, one, two, three or all of the charged amino acids are negatively charged. In another embodiment the analog further comprises an acidic amino acid substituted for the native amino acid at position 28 or 29 or an acidic amino acid added to the carboxy terminus of the peptide of SEQ ID NO: 34.

[0797] In some embodiments the glucagon analogs disclosed herein are further modified at position 1 or 2 to reduce susceptibility to cleavage by dipeptidyl peptidase IV. In some embodiments a glucagon analog of SEQ ID NO: 9, SEQ ID NO: 11, SEQ ID NO: 12, SEQ ID NO: 13, SEQ ID NO: 14 or SEQ ID NO: 15 is provided wherein the analog differs from the parent molecule by a substitution at position 2 and exhibits reduced susceptibility (i.e., resistance) to cleavage by dipeptidyl peptidase IV. More particularly, in some embodiments position 2 of the analog peptide is substituted with an amino acid selected from the group consisting of D-serine, D-alanine, valine, amino n-butyric acid, glycine, N-methyl serine and aminoisobutyric acid. In some embodiments position 2 of the analog peptide is substituted with an amino acid selected from the group consisting of D-serine, D-alanine, glycine, N-methyl serine and aminoisobutyric acid. In another embodiment position 2 of the analog peptide is substituted with an amino acid selected from the group consisting of D-serine, glycine, N-methyl serine and aminoisobutyric acid. In some embodiments the amino acid at position 2 is not D-serine. In some embodiments the glucagon peptide comprises the sequence of SEQ ID NO: 21 or SEQ ID NO: 22.

[0798] In some embodiments a glucagon analog of SEQ ID NO: 9, SEQ ID NO: 11, SEQ ID NO: 12, SEQ ID NO: 13, SEQ ID NO: 14 or SEQ ID NO: 15 is provided wherein the analog differs from the parent molecule by a substitution at position 1 and exhibits reduced susceptibility (i.e., resistance) to cleavage by dipeptidyl peptidase IV. More particularly, position 1 of the analog peptide is substituted with an amino acid selected from the group consisting of D-histidine, alpha, alpha-dimethyl imidiazole acetic acid (DMIA), N-methyl histidine, alpha-methyl histidine, imidazole acetic acid, desaminohistidine, hydroxyl-histidine, acetyl-histidine and homo-histidine. In another embodiment a glucagon agonist is provided comprising an analog peptide of SEQ ID NO: 34 wherein the analog differs from SEQ ID NO: 34 by having an amino acid other than histidine at position 1. In some embodiments the solubility of the analog is increased, for example, by introducing one, two, three or more charged amino acid(s) to the C-terminal portion of native glucagon, preferably at a position C-terminal to position 27. In exemplary embodiments, one, two, three or all of the charged amino acids are negatively charged. In another embodiment the analog further comprises an acidic amino acid substituted for the native amino acid at position 28 or 29 or an acidic amino acid added to the carboxy terminus of the peptide of SEQ ID NO: 34. In some embodiments the acidic amino acid is aspartic acid or glutamic acid.

[0799] In some embodiments the glucagon/GLP-1 receptor co-agonist comprises a sequence of SEQ ID NO: 20 further comprising an additional carboxy terminal extension of one amino acid or a peptide selected from the group consisting of SEQ ID NO: 26, SEQ ID NO: 27 and SEQ ID NO: 28. In the embodiment wherein a single amino acid is added to the carboxy terminus of SEQ ID NO: 20, the amino acid is typically selected from one of the 20 common amino acids, and in some embodiments the additional carboxy terminus amino acid has an amide group in place of the carboxylic acid of the native amino acid. In some embodiments the additional amino acid is selected from the group consisting of glutamic acid, aspartic acid and glycine.

[0800] In an alternative embodiment a glucagon/GLP-1 receptor co-agonist is provided wherein the peptide comprises at least one lactam ring formed between the side chain of a glutamic acid residue and a lysine residue, wherein the glutamic acid residue and a lysine residue are separated by three amino acids. In some embodiments the carboxy terminal amino acid of the lactam bearing glucagon peptide has an amide group in place of the carboxylic acid of the native amino acid. More particularly, in some embodiments a glucagon and GLP-1 co-agonist is provided comprising a modified glucagon peptide selected from the group consisting of:

(SEQ ID NO: 66)
NH₂-His-Ser-Gln-Gly-Thr-Phe-Thr-Ser-Asp-Tyr-Ser-Lys-Tyr-Leu-Asp-Glu-Arg-Arg-
Ala-Gln-Asp-Phe-Val-Gln-Trp-Leu-Met-Xaa-Xaa-R
(SEQ ID NO: 67)
NH₂-His-Ser-Gln-Gly-Thr-Phe-Thr-Ser-Asp-Tyr-Ser-Lys-Tyr-Leu-Asp-Glu-Arg-Arg-
Ala-Lys-Asp-Phe-Val-Gln-Trp-Leu-Met-Xaa-Xaa-R
(SEQ ID NO: 68)
NH₂-His-Ser-Gln-Gly-Thr-Phe-Thr-Ser-Asp-Tyr-Ser-Lys-Tyr-Leu-Asp-Ser-Arg-Arg-
Ala-Lys-Asp-Phe-Val-Glu-Trp-Leu-Met-Xaa-Xaa-R
(SEQ ID NO: 69)
NH₂-His-Ser-Gln-Gly-Thr-Phe-Thr-Ser-Asp-Tyr-Ser-Lys-Tyr-Leu-Asp-Ser-Arg-Arg-
Ala-Gln-Asp-Phe-Val-Glu-Trp-Leu-Met-Lys-Xaa-R
(SEQ ID NO: 16)
NH₂-His-Ser-Gln-Gly-Thr-Phe-Thr-Ser-Asp-Tyr-Ser-Lys-Tyr-Leu-Asp-Glu-Arg-Arg-
Ala-Lys-Asp-Phe-Val-Glu-Trp-Leu-Met-Asn-Thr-R
(SEQ ID NO: 17)
NH₂-His-Ser-Gln-Gly-Thr-Phe-Thr-Ser-Asp-Tyr-Ser-Lys-Tyr-Leu-Asp-Glu-Arg-Arg-
Ala-Gln-Asp-Phe-Val-Glu-Trp-Leu-Met-Lys-Thr-R
(SEQ ID NO: 18)
NH₂-His-Ser-Gln-Gly-Thr-Phe-Thr-Ser-Asp-Tyr-Ser-Lys-Tyr-Leu-Asp-Glu-Arg-Arg-
Ala-Lys-Asp-Phe-Val-Glu-Trp-Leu-Met-Lys-Thr-R

[0801] wherein Xaa at position 28 is Asp, or Asn, the Xaa at position 29 is Thr or Gly, R is selected from the group consisting of COOH, CONH₂, glutamic acid, aspartic acid, glycine, SEQ ID NO: 26, SEQ ID NO: 27 and SEQ ID NO: 28, and a lactam bridge is formed between Lys at position 12 and Glu at position 16 for SEQ ID NO: 66, between Glu at position 16 and Lys at position 20 for SEQ ID NO: 67, between Lys at position 20 and Glu at position 24 for SEQ ID NO: 68, between Glu at position 24 and Lys at position 28 for SEQ ID NO: 69, between Lys at position 12 and Glu at position 16 and between Lys at position 20 and Glu at position 24 for SEQ ID NO: 16, between Lys at position 12 and Glu at position 16 and between Glu at position 24 and Lys at position 28 for SEQ ID NO: 17 and between Glu at position 16 and Lys at position 20 and between Glu at position 24 and Lys at position 28 for SEQ ID NO: 18. In some embodiments R is selected from the group consisting of COOH, CONH₂, glutamic acid, aspartic acid, glycine, the amino acid at position 28 is Asn, and the amino acid at position 29 is threonine. In some embodiments R is CONH₂, the amino acid at position 28 is Asn and the amino acid at position 29 is threonine. In another embodiment R is selected from the group consisting of SEQ ID NO: 26, SEQ ID NO: 29 and SEQ ID NO: 65 and the amino acid at position 29 is glycine.

[0802] In a further embodiment the glucagon/GLP-1 receptor co-agonist is selected from the group consisting of SEQ ID NO: 11, SEQ ID NO: 12, SEQ ID NO: 13, SEQ ID NO: 14, SEQ ID NO: 15, SEQ ID NO: 16, SEQ ID NO: 17 and SEQ ID NO: 18, wherein the peptide further comprises an additional carboxy terminal extension of one amino acid or a peptide selected from the group consisting of SEQ ID NO: 26, SEQ ID NO: 27 and SEQ ID NO: 28. In some embodiments the terminal extension comprises the sequence of SEQ ID NO: 26, SEQ ID NO: 29 or SEQ ID NO: 65 and the glucagon peptide comprises the sequence of SEQ ID NO: 55. In some embodiments the glucagon/GLP-1 receptor co-agonist comprises the sequence of SEQ ID NO: 33 wherein the amino acid at position 16 is glutamic acid, the amino acid at position 20 is lysine, the amino acid at position 28 is asparagine and the amino acid sequence of SEQ ID No: 26 or SEQ ID NO: 29 is linked to the carboxy terminus of SEQ ID NO: 33.

[0803] In the embodiment wherein a single amino acid is added to the carboxy terminus of SEQ ID NO: 20, the amino acid is typically selected from one of the 20 common amino acids, and in some embodiments the amino acid has an amide group in place of the carboxylic acid of the native amino acid. In some embodiments the additional amino acid is selected from the group consisting of glutamic acid and aspartic acid and glycine. In the embodiments wherein the glucagon agonist analog further comprises a carboxy terminal extension, the carboxy terminal amino acid of the extension, in some embodiments, ends in an amide group or an ester group rather than a carboxylic acid.

[0804] In another embodiment the glucagon/GLP-1 receptor co-agonist comprises the sequence: NH₂-His-Ser-Gln-Gly-Thr-Phe-Thr-Ser-Asp-Tyr-Ser-Lys-Tyr-Leu-Asp-Glu-Arg-Arg-Ala-Gln-Asp-Phe-Val-Gln-Trp-Leu-Met-Asn-Thr-Xaa-CONH₂ (SEQ ID NO: 19), wherein the Xaa at position 30 represents any amino acid. In some embodiments Xaa is selected from one of the 20 common amino acids, and in some embodiments the amino acid is glutamic acid, aspartic acid or glycine. The solubility of this peptide can be further improved by covalently linking a PEG chain to the side chain of amino acid at position 17, 21, 24 or 30 of SEQ ID NO: 19. In a further embodiment the peptide comprises an additional carboxy terminal extension of a peptide selected from the group consisting of SEQ ID NO: 26, SEQ ID NO: 27 and SEQ ID NO: 28. In accordance with some embodiments the glucagon/GLP-1 receptor co-agonist comprises the sequence of SEQ ID NO: 30, SEQ ID NO: 31 and SEQ ID NO: 32.

[0805] Additional site specific modifications internal to the glucagon sequence of SEQ ID NO: 11, SEQ ID NO: 12, SEQ ID NO: 13, SEQ ID NO: 14, SEQ ID NO: 15, SEQ ID NO: 16, SEQ ID NO: 17, SEQ ID NO: 18, SEQ ID NO: 19 and SEQ ID NO: 64 can be made to yield a set of glucagon agonists that possess variable degrees of GLP-1 agonism. Accordingly, peptides that possess virtually identical in vitro potency at each receptor have been prepared and characterized. Similarly, peptides with tenfold selectively enhanced potency at each of the two receptors have been identified and characterized. As noted above substitution of the serine residue at position 16 with glutamic acid enhances the potency of native glucagon at both the Glucagon and GLP-1 receptors, but maintains approximately a tenfold selectivity for the glucagon receptor. In addition by substituting the native glutamine at position 3 with glutamic acid (SEQ ID NO: 22) generates a glucagon analog that exhibits approximately a tenfold selectivity for the GLP-1 receptor.

[0806] The solubility of the glucagon/GLP-1 co-agonist peptides can be further enhanced in aqueous solutions at physiological pH, while retaining the high biological activity relative to native glucagon by the introduction of hydrophilic groups at positions 16, 17, 21, and 24 of the peptide, or by the addition of a single modified amino acid (i.e., an amino acid modified to comprise a hydrophilic group) at the carboxy terminus of the glucagon/GLP-1 co-agonist peptide. In accordance with some embodiments the hydrophilic group comprises a polyethylene (PEG) chain. More particularly, in some embodiments the glucagon peptide comprises the sequence of SEQ ID NO: 10, SEQ ID NO: 11, SEQ ID NO: 12, SEQ ID NO: 13, SEQ ID NO: 14, SEQ ID NO: 15, SEQ ID NO: 16, SEQ ID NO: 17 or SEQ ID NO: 18 wherein a PEG chain is covalently linked to the side chain of an amino acids at position 16, 17, 21, 24, 29 or the C-terminal amino acid of the glucagon peptide, with the proviso that when the peptide comprises SEQ ID NO: 10, SEQ ID NO: 11, SEQ ID NO: 12 or SEQ ID NO: 13 the polyethylene glycol chain is covalently bound to an amino acid residue at position 17, 21 or 24, when the peptide comprises SEQ ID NO: 14 or SEQ ID NO: 15 the polyethylene glycol chain is covalently bound to an amino acid residue at position 16, 17 or 21, and when the peptide comprises SEQ ID NO: 16, SEQ ID NO: 17 or SEQ ID NO: 18 the polyethylene glycol chain is covalently bound to an amino acid residue at position 17 or 21.

[0807] In some embodiments the glucagon peptide comprises the sequence of SEQ ID NO: 11, SEQ ID NO: 12 or SEQ ID NO: 13, wherein a PEG chain is covalently linked to the side chain of an amino acids at position 17, 21, 24, or the C-terminal amino acid of the glucagon peptide, and the carboxy terminal amino acid of the peptide has an amide group in place of the carboxylic acid group of the native amino acid. In some embodiments the glucagon/GLP-1 receptor co-agonist peptide comprises a sequence selected from the group consisting of SEQ ID NO: 12, SEQ ID NO: 13, SEQ ID NO: 14, SEQ ID NO: 15, SEQ ID NO: 16, SEQ ID NO: 17, SEQ ID NO: 18 and SEQ ID NO: 19, wherein a PEG chain is covalently linked to the side chain of an amino acid at position 17, 21 or 24 of SEQ ID NO: 12, SEQ ID NO: 13 and SEQ ID NO: 19, or at position 16, 17 or 21 of SEQ ID NO: 14 and SEQ ID NO: 15 or at position 17 or 21 of SEQ ID NO: 16, SEQ ID NO: 17 and SEQ ID NO: 18 of the glucagon peptide. In another embodiment the glucagon/GLP-1 receptor co-agonist peptide comprises the sequence of SEQ ID NO: 11 or SEQ ID NO: 19, wherein a PEG chain is covalently linked to the side chain of an amino acids at position 17, 21 or 24 or the C-terminal amino acid of the glucagon peptide.

[0808] In accordance with some embodiments, and subject to the proviso limitations described in the preceding paragraphs, the glucagon co-agonist peptide is modified to contain one or more amino acid substitution at positions 16, 17, 21, 24, or 29 or the C-terminal amino acid, wherein the native amino acid is substituted with an amino acid having a side chain suitable for crosslinking with hydrophilic moieties, including for example, PEG. The native peptide can be substituted with a naturally occurring amino acid or a synthetic (non-naturally occurring) amino acid. Synthetic or non-naturally occurring amino acids refer to amino acids that do not naturally occur in vivo but which, nevertheless, can be incorporated into the peptide structures described herein. Alternatively, the amino acid having a side chain suitable for crosslinking with hydrophilic moieties, including for example, PEG, can be added to the carboxy terminus of any of the glucagon analogs disclosed herein. In accordance with some embodiments an amino acid substitution is made in the glucagon/GLP-1 receptor co-agonist peptide at a position selected from the group consisting of 16, 17, 21, 24, or 29 replacing the native amino acid with an amino acid selected from the group consisting of lysine, cysteine, ornithine, homocysteine and acetyl phenylalanine, wherein the substituting amino acid further comprises a PEG chain covalently bound to the side chain of the amino acid. In some embodiments a glucagon peptide selected form the group consisting of SEQ ID NO: 12, SEQ ID NO: 13, SEQ ID NO: 14, SEQ ID NO: 15, SEQ ID NO: 16, SEQ ID NO: 17, SEQ ID NO: 18, and SEQ ID NO: 19 is further modified to comprise a PEG chain is covalently linked to the side chain of an amino acid at position 17 or 21 of the glucagon peptide. In some embodiments the pegylated glucagon/GLP-1 receptor co-agonist further comprises the sequence of SEQ ID NO: 26, SEQ ID NO: 27 or SEQ ID NO: 29.

[0809] In another embodiment the glucagon peptide comprises the sequence of SEQ ID NO: 55 or SEQ ID NO: 56, further comprising a C-terminal extension of SEQ ID NO: 26, SEQ ID NO: 29 or SEQ ID NO: 65 linked to the C-terminal amino acid of SEQ ID NO: 55 or SEQ ID NO: 56, and optionally further comprising a PEG chain covalently linked to the side chain of an amino acids at position 17, 18, 21, 24 or 29 or the C-terminal amino acid of the peptide. In another embodiment the glucagon peptide comprises the sequence of SEQ ID NO: 55 or SEQ ID NO: 56, wherein a PEG chain is covalently linked to the side chain of an amino acids at position 21 or 24 of the glucagon peptide and the peptide further comprises a C-terminal extension of SEQ ID NO: 26, or SEQ ID NO: 29.

[0810] In another embodiment the glucagon peptide comprises the sequence of SEQ ID NO: 55, or SEQ ID NO: 33 or SEQ ID NO: 34, wherein an additional amino acid is added to the carboxy terminus of SEQ ID NO: 33 or SEQ ID NO: 34, and a PEG chain is covalently linked to the side chain of the added amino acid. In a further embodiment, the pegylated glucagon analog further comprises a C-terminal extension of SEQ ID NO: 26 or SEQ ID NO: 29 linked to the C-terminal amino acid of SEQ ID NO: 33 or SEQ ID NO: 34. In another embodiment the glucagon peptide comprises the sequence of SEQ ID NO: 19, wherein a PEG chain is covalently linked to the side chain of the amino acid at position 30 of the glucagon peptide and the peptide further comprises a C-terminal extension of SEQ ID NO: 26 or SEQ ID NO: 29 linked to the C-terminal amino acid of SEQ ID NO: 19.

[0811] The polyethylene glycol chain may be in the form of a straight chain or it may be branched. In accordance with some embodiments the polyethylene glycol chain has an average molecular weight selected from the range of about 500 to about 10,000 Daltons. In some embodiments the polyethylene glycol chain has an average molecular weight selected from the range of about 1,000 to about 5,000 Daltons. In an alternative embodiment the polyethylene glycol chain has an average molecular weight selected from the range of about 10,000 to about 20,000 Daltons. In accordance with some embodiments the pegylated glucagon peptide comprises two or more polyethylene glycol chains covalently bound to the glucagon peptide wherein the total molecular weight of the glucagon chains is about 1,000 to about 5,000 Daltons. In some embodiments the pegylated glucagon agonist comprises a peptide consisting of SEQ ID NO: 5 or a glucagon agonist analog of SEQ ID NO: 5, wherein a PEG chain is covalently linked to the amino acid residue at position 21 and at position 24, and wherein the combined molecular weight of the two PEG chains is about 1,000 to about 5,000 Daltons.

[0812] In certain exemplary embodiments, the glucagon peptide comprises the amino acid sequence of SEQ ID NO: 1 with up to ten amino acid modifications and comprises an amino acid at position 10 which is acylated or alkylated. In some embodiments, the amino acid at position 10 is acylated or alkylated with a C4 to C30 fatty acid. In certain aspects, the amino acid at position 10 comprises an acyl group or an alkyl group which is non-native to a naturally-occurring amino acid.

[0813] In certain embodiments, the glucagon peptide comprising an amino acid at position 10 which is acylated or alkylated comprises a stabilized alpha helix. Accordingly, in certain aspects, the glucagon peptide comprises an acyl or alkyl group as described herein and an intramolecular bridge, e.g., a covalent intramolecular bridge (e.g., a lactam bridge) between the side chains of an amino acid at position i and an amino acid at position i+4, wherein i is 12, 16, 20, or 24. Alternatively or additionally, the glucagon peptide comprises an acyl or alkyl group as described herein and one, two, three or more of positions 16, 20, 21 and/or 24 of the glucagon peptide are substituted with an α,α-disubstituted amino acid, e.g., Aib. In some instances, the non-native glucagon peptide comprises Glu at position 16 and Lys at position 20, wherein optionally a lactam bridge lnkes the Glu and the Lys, and, optionally, the glucagon peptide further comprises one or more modifications selected from the group consisting of: Gln at position 17, Ala at position 18, Glu at position 21, Ile at position 23, and Ala at position 24.

[0814] Also, in any of the embodiments, wherein the glucagon peptide comprises an amino acid at position 10 which is acylated or alkylated, the glucagon peptide can further comprise a C-terminal amide in lieu of the C-terminal alpha carboxylate.

[0815] In some embodiments, the glucagon peptide comprising an acyl or alkyl group as described herein further comprises an amino acid substitution at position 1, at position 2, or at positions 1 and 2, wherein the amino acid substitution(s) achieve DPP-IV protease resistance. For example, the His at position 1 may be substituted with an amino acid selected from the group consisting of: D-histidine, alpha, alpha-dimethyl imidazole acetic acid (DMIA), N-methyl histidine, alpha-methyl histidine, imidazole acetic acid, desaminohistidine, hydroxyl-histidine, acetyl-histidine and homo-histidine. Alternatively or additionally, the Ser at position 2 may be substituted with an amino acid selected from the group consisting of: D-serine, alanine, D-alanine, valine, glycine, N-methyl serine, N-methyl alanine, and amino isobutyric acid. In some embodiments the amino acid at position 2 is not D-serine.

[0816] The glucagon peptide comprising the amino acid at position 10 which is acylated or alkylated as described herein can comprise any amino acid sequence which is substantially related to SEQ ID NO: 1. For instance, the glucagon peptide comprises SEQ ID NO: 1 with up to 10 amino acid modifications (e.g., 0, 1, 2, 3, 4, 5, 6, 7, 8, 9, 10 modifications). In certain embodiments, the amino acid sequence of the acylated or alkylated glucagon peptide is greater than 25% identical to SEQ ID NO: 1 (e.g., greater than 30%, 35%, 40%, 50%, 60%, 70% 75%, 80%, 85%, 90%, 95%, 96%, 97%, 98%, 99%, or nearly 100% identical to SEQ ID NO: 1). In certain specific embodiments, the glucagon peptide is one which comprises SEQ ID NOs: 55 with an amino acid at position 10 acylated or alkylated as described herein. The glucagon peptide can be any of SEQ ID NOs: 55, 55 with 1 or 2 amino acid modifications, 2-4, 9-18, 20, 23-25, 33, 40-44, 53, 56, 61, 62, 64, 66-514, and 534.

[0817] The acyl or alkyl group of these embodiments may be any acyl or alkyl group described herein. For example, the acyl group may be a C4 to C30 (e.g., C8 to C24) fatty acyl group and the alkyl group may be a C4 to C30 (e.g., C8 to C24) alkyl group.

[0818] The amino acid to which the acyl or alkyl group is attached may be any of the amino acids described herein, e.g., an amino acid of any of Formula I (e.g., Lys), Formula II, and Formula III.

[0819] In some embodiments, the acyl group or alkyl group is directly attached to the amino acid at position 10. In some embodiments, the acyl or alkyl group is attached to the amino acid at position 10 via a spacer, such as, for example, a spacer which is 3 to 10 atoms in length, e.g., an amino acid or dipeptide. Suitable spacers for purposes of attaching an acyl or alkyl group are described herein.

[0820] In accordance with some embodiments, the Class 3 glucagon related peptide may be an analog of any of the foregoing Class 3 glucagon related peptides as described herein, which analog exhibits agonist activity at the GIP receptor. The activity level of the analog at the glucagon receptor, the GLP-1 receptor, and the GIP receptor, the potency at each of these receptors, and the selectivity for each of these receptors may be in accordance with the teachings of Class 2 glucagon related peptides described herein. See, the teachings under the subsection of the Class 2 glucagon related peptide section entitled “Activity.”

[0821] In some embodiments of the invention, an analog of a glucagon peptide, which analog exhibits agonist activity at the GIP receptor, is provided. The analog in certain embodiments comprises the amino acid sequence of SEQ ID NO: 1 with at least one amino acid modification (optionally, up to 15 amino acid modifications), and an extension of 1 to 21 amino acids C-terminal to the amino acid at position 29 of the analog.

[0822] In certain aspects, the analogs comprise at least one amino acid modification and up to 15 amino acid modifications (e.g., 1, 2, 3, 4, 5, 6, 7, 8, 9, 10, 11, 12, 13, 14, 15 amino acid modifications, up to 10 amino acid modifications). In certain embodiments, the analogs comprise at least one amino acid modification at up to 10 amino acid modifications and additional conservative amino acid modifications. Conservative amino acid modifications are described herein.

[0823] In some aspects, at least one of the amino acid modifications confers a stabilized alpha helix structure in the C-terminal portion of the analog. Modifications which achieve a stabilized alpha helix structure are described herein. See, for example, the teachings under the section entitled Stabilization of the alpha helix/Intramolecular bridges. In some aspects, the analog comprises an intramolecular bridge (e.g., a covalent intramolecular bridge, a non-covalent intramolecular bridge) between the side chains of two amino acids of the analog. In certain aspects, an intramolecular bridge links the side chains of the amino acids at positions i and i+4, wherein i is 12, 13, 16, 17, 20, or 24. In other aspects, an intramolecular bridge connects the side chains of the amino acids at positions j and j+3, wherein j is 17, or at positions k and k+7″ wherein k is any integer between 12 and 22. In certain embodiments, the intramolecular bridge is a covalent intramolecular bridge, e.g., a lactam bridge. In specific aspects, the lactam bridge connects the side chains of the amino acids at positions 16 and 20. In particular aspects, one of the amino acids at positions 16 and 20 is a positive-charged amino acid and the other is a negative-charged amino acid. For example, the analog can comprise a lactam bridge connecting the side chains of a Glu at position 16 and a Lys at position 20. In other aspects, the negative-charged amino acid and the positive-charged amino acid form a salt bridge. In this instance, the intramolecular bridge is a non-covalent intramolecular bridge.

[0824] In particular aspects, the amino acid modification which confers a stabilized alpha helix is an insertion or substitution of an amino acid of SEQ ID NO: 1 with an α,α-disubstituted amino acid. Suitable α,α-disubstituted amino acids for purposes of stabilizing the alpha helix are described herein and include, for example, Aib. In some aspects, one, two, three, or more of the amino acids at positions 16, 20, 21, and 24 of SEQ ID NO: 1 are substituted with an α,α-disubstituted amino acid, e.g., Aib. In particular embodiments, the amino acid at position 16 is Aib.

[0825] The analog which exhibits agonist activity at the GIP receptor can comprise additional modifications, such as any of those described herein. For instance, the amino acid modifications may increase or decrease activity at one or both of the GLP-1 receptor and glucagon receptor. The amino acid modifications may increase stability of the peptide, e.g., increase resistance to DPP-IV protease degradation, stabilize the bond between amino acids 15 and 16. The amino acid modifications may increase the solubility of the peptide and/or alter the time of action of the analog at any of the GIP, glucagon, and GLP-1 receptors. A combination of any of these types of modifications may be present in the analogs which exhibit agonist activity at the GIP receptor.

[0826] Accordingly, in some aspects, the analog comprises the amino acid sequence of SEQ ID NO: 1 with one or more of: Gln at position 17, Ala at position 18, Glu at position 21, Ile at position 23, and Ala or Cys at position 24, or conservative amino acid substitutions thereof. In some aspects, the analog comprises a C-terminal amide in place of the C-terminal alpha carboxylate. In certain embodiments, the analog comprises an amino acid substitution at position 1, position 2, or positions 1 and 2, which substitution(s) achieve DPP-IV protease resistance. Suitable amino acid substitutions are described herein. For example, DMIA at position 1 and/or d-Ser or Aib at position 2. In some embodiments, the amino acid at position 2 is not D-serine.

[0827] Additionally or alternatively, the analog may comprise one or a combination of: (a)

[0828] Ser at position 2 substituted with Ala; (b) Gln at position 3 substituted with Glu or a glutamine analog; (c) Thr at position 7 substituted with a Ile; (d) Tyr at position 10 substituted with Trp or an amino acid comprising an acyl or alkyl group which is non-native to a naturally-occurring amino acid; (e) Lys at position 12 substituted with Ile; (f) Asp at position 15 substituted with Glu; (g) Ser at position 16 substituted with Glu; (h) Gln at position 20 substituted with Ser, Thr, Ala, Aib; (i) Gln at position 24 substituted with Ser, Thr, Ala, Aib; (j) Met at position 27 substituted with Leu or Nle; (k) Asn at position 29 substituted with a charged amino acid, optionally, Asp or Glu; and (l) Thr at position 29 substituted with Gly or a charged amino acid, optionally, Asp or Glu.

[0829] With regard to the analogs which exhibit agonist activity at the GIP receptor, the analog comprises an extension of 1-21 amino acids (e.g., 5-19, 7-15, 9-12 amino acids). The extension of the analog may comprise any amino acid sequence, provided that the extension is 1 to 21 amino acids. In some aspects, the extension is 7 to 15 amino acids and in other aspects, the extension is 9 to 12 amino acids. In some embodiments, the extension comprises (i) the amino acid sequence of SEQ ID NO: 26 or 674, (ii) an amino acid sequence which has high sequence identity (e.g., at least 80%, 85%, 90%, 95%, 98%, 99%) with the amino acid sequence of SEQ ID NO: 26 or 674, or (iii) the amino acid sequence of (i) or (ii) with one or more conservative amino acid modifications.

[0830] In some embodiments, at least one of the amino acids of the extension is acylated or alkylated. The amino acid comprising the acyl or alkyl group may be located at any position of extension of the analog. In certain embodiments, the acylated or alkylated amino acid of the extension is located at one of positions 37, 38, 39, 40, 41, or 42 (according to the numbering of SEQ ID NO: 1) of the analog. In certain embodiments, the acylated or alkylated amino acid is located at position 40 of the analog.

[0831] In exemplary embodiments, the acyl or alkyl group is an acyl or alkyl group which is non-native to a naturally-occurring amino acid. For example, the acyl or alkyl group may be a C4 to C30 (e.g., C12 to C18) fatty acyl group or C4 to C30 (e.g., C12 to C18) alkyl. The acyl or alkyl group may be any of those discussed herein.

[0832] In some embodiments, the acyl or alkyl group is attached directly to the amino acid, e.g., via the side chain of the amino acid. In other embodiments, the acyl or alkyl group is attached to the amino acid via a spacer (e.g., an amino acid, a dipeptide, a tripeptide, a hydrophilic bifunctional spacer, a hydrophobic bifunctional spacer). In certain aspects, the spacer is 3 to 10 atoms in length. In some embodiments, the amino acid spacer is not γ-Glu. In some embodiments, the dipeptide spacer is not γ-Glu-γ-Glu.

[0833] Also, in exemplary embodiments, the amino acid to which the acyl or alkyl group is attached may be any of those described herein, including, for example, an amino acid of Formula I, II, or III. The amino acid which is acylated or alkylated may be a Lys, for example. Suitable amino acids comprising an acyl or alkyl group, as well as suitable acyl groups and alkyl groups, are described herein. See, for example, the teachings under the sections entitled Acylation and Alkylation.

[0834] In other embodiments, 1-6 amino acids (e.g., 1-2, 1-3, 1-4, 1-5 amino acids) of the extension are positive-charged amino acids, e.g., amino acids of Formula IV, such as, for example, Lys. As used herein, the term “positive-charged amino acid” refers to any amino acid, naturally-occurring or non-naturally occurring, comprising a positive charge on an atom of its side chain at a physiological pH. In certain aspects, the positive-charged amino acids are located at any of positions 37, 38, 39, 40, 41, 42, and 43. In specific embodiments, a positive-charged amino acid is located at position 40.

[0835] In other instances, the extension is acylated or alkylated as described herein and comprises 1-6 positive charged amino acids as described herein.

[0836] In yet other embodiments, the analogs which exhibit agonist activity at the GIP receptor comprises (i) SEQ ID NO: 1 with at least one amino acid modification, (ii) an extension of 1 to 21 amino acids (e.g., 5 to 18, 7 to 15, 9 to 12 amino acids) C-terminal to the amino acid at position 29 of the analog, and (iii) an amino acid comprising an acyl or alkyl group which is non-native to a naturally-occurring amino acid which is located outside of the C-terminal extension (e.g., at any of positions 1-29). In some embodiments, the analog comprises an acylated or alkylated amino acid at position 10. In particular aspects, the acyl or alkyl group is a C4 to C30 fatty acyl or C4 to C30 alkyl group. In some embodiments, the acyl or alkyl group is attached via a spacer, e.g., an amino acid, dipeptide, tripeptide, hydrophilic bifunctional spacer, hydrophobic bifunctional spacer). In certain aspects, the analog comprises an amino acid modification which stabilizes the alpha helix, such as a salt bridge between a Glu at position 16 and a Lys at position 20, or an alpha, alpha-disubstituted amino acid at any one, two, three, or more of positions 16, 20, 21, and 24. In specific aspects, the analog additionally comprises amino acid modifications which confer DPP-IV protease resistance, e.g., DMIA at position 1, Aib at position 2. Analogs comprising further amino acid modifications are contemplated herein.

[0837] In certain embodiments, the analogs having GIP receptor activity exhibit at least 0.1% (e.g., at least 0.5%, 1%, 2%, 5%, 10%, 15%, or 20%) activity of native GIP at the GIP receptor. In some embodiments, the analogs exhibit more than 20% (e.g., more than 50%, more than 75%, more than 100%, more than 200%, more than 300%, more than 500%) activity of native GIP at the GIP receptor. In some embodiments, the analog exhibits appreciable agonist activity at one or both of the GLP-1 and glucagon receptors. In some aspects, the selectivity for these receptors (GIP receptor and GLP-1 receptor and/or glucagon receptor) are within 1000-fold. For example, the selectivity for the GLP-1 receptor of the analogs having GIP receptor activity can be less than 500-fold, 100-fold, within 50-fold, within 25 fold, within 15 fold, within 10 fold) the selectivity for the GIP receptor and/or the glucagon receptor.

[0838] In accordance with some embodiments, the Class 3 glucagon related peptide comprises the amino acid sequence of native glucagon (SEQ ID NO: 1) comprising the following modifications: Aib at position 2, Glu at position 3, Lys at position 10, Glu at position 16, Gln at position 17, Ala at position 18, Lys at position 20, Glu at position 21, Ile at position 23, Ala at position 24; wherein Lys at position 10 is acylated with a C14 or C16 fatty acid, and wherein the C-terminal carboxylate is replaced with an amide In a specific embodiment, this Class 3 glucagon related peptide is attached via a linker (L) to a NHR ligand (Y).

[0839] In accordance with some embodiments, the Class 3 glucagon related peptide comprises, consists essentially of, or consists of an amino acid sequence of any of SEQ ID NOs: 70-514, 517-534, or 554, optionally with up to 1, 2, 3, 4, or 5 further modifications that retain GLP-1 agonist and/or glucagon agonist activity. In certain embodiments, the Class 3 glucagon related peptide comprises the amino acids of any of SEQ ID NOs: 562-760. In some embodiments, the Class 3 glucagon related peptide comprises the amino acid sequences of any of SEQ ID NOs: 1301-1421.

### Class 4 Glucagon Related Peptides

[0840] In certain embodiments, Q is a Class 4 glucagon related peptide (see, e.g., International (PCT) Patent Application Publication No. WO 2009/058662, incorporated herein by reference in its entirety.

[0841] All biological sequences referenced in the following section (SEQ ID NOs: 1301-1371) correspond to SEQ ID NOs: 1-71 in WO 2009/058662.

### Activity

[0842] In accordance with some embodiments, Class 4 glucagon related peptides are provided (hereafter referred to as “Class 4 peptides”). In certain aspects a Class 4 peptide is provided which has glucagon antagonist activity. A glucagon antagonists would be used in any setting where the suppression of glucagon agonism is desired. The most immediate and obvious use would be in the treatment of diabetes where glucagon antagonism has been demonstrated in pre-clinical models of hyperglycemia to yield a lowering of blood glucose. Glucagon antagonists can be further modified to improve the biophysical stability and/or aqueous solubility of the compounds while maintaining the antagonist activity of the parent compound. In certain aspects a Class 4 peptide is defined as a pure glucagon antagonist.

[0843] The term “glucagon antagonist” refers to a compound that counteracts glucagon activity or prevents glucagon function. For example, a glucagon antagonist exhibits at least 60% inhibition (e.g., at least 70% inhibition) and preferably, at least 80% inhibition, of the maximum response achieved by glucagon at the glucagon receptor. In some embodiments, the glucagon antagonist exhibits at least 90% inhibition of the maximum response achieved by glucagon at the glucagon receptor. In a specific embodiment, the glucagon antagonist exhibits 100% inhibition of the maximum response achieved by glucagon at the glucagon receptor. Additionally, a glucagon antagonist at a concentration of about 1 μM exhibits less than about 20% of the maximum agonist activity achieved by glucagon at the glucagon receptor. In some embodiments, the glucagon antagonist exhibits less than about 10% of the maximum agonist activity achieved by glucagon at the glucagon receptor. In a specific embodiment, the glucagon antagonist exhibits less than about 5% of the maximum agonist activity achieved by glucagon at the glucagon receptor. In yet another specific embodiment, the glucagon antagonist exhibits 0% of the maximum agonist activity achieved by glucagon at the glucagon receptor.

[0844] A “pure glucagon antagonist” is a glucagon antagonist that does not produce any detected stimulation of glucagon or GLP-1 receptor activity, as measured by cAMP production using a validated in vitro model assay (see, e.g., WO 2009/058662). For example, a pure glucagon antagonist exhibits less than about 5% (e.g., less than about 4%, less than about 3%, less than about 2%, less than about 1%, about 0%) of the maximum agonist activity achieved by glucagon at the glucagon receptor and exhibits less than about 5% (e.g., less than about 4%, less than about 3%, less than about 2%, less than about 1%, and about 0%) of the maximum agonist activity achieved by GLP-1 at the GLP-1 receptor.

[0845] Accordingly, in some aspects, there is provided Class 4 peptides that exhibit pure glucagon antagonist activity. In accordance with some embodiments the glucagon antagonist exhibits activity that reduces glucagon receptor glucagon-induced cAMP production by a maximum of at least 50% when the glucagon receptor is contacted simultaneously with 0.8 nM of glucagon and the glucagon antagonist, as measured by cAMP production in an in vitro assay. In some embodiments, the glucagon antagonist reduces glucagon receptor glucagon-induced cAMP production by a maximum amount of at least 80%.

[0846] Class 4 peptides are believed to be suitable for any use that has previously been described for glucagon antagonists. Accordingly, the Class 4 peptides described herein can be used to treat hyperglycemia, or treat other metabolic diseases that result from high blood levels of glucagon or high blood glucose levels. In accordance with some embodiments the patient to be treated using the Class 4 peptides disclosed herein is a domesticated animal, and in another embodiment the patient to be treated is a human. Studies suggest that lack of glucagon suppression in diabetic patients contributes to postprandial hyperglycemia in part via accelerated glycogenolysis. Analysis of blood glucose during an Oral Glucose Tolerance Test (OGTT), and in the presence or absence of somatostatin-induced glucagon suppression, has shown a significant increase in glucose in subjects with higher glucagon levels. Accordingly, the Class 4 peptides of the present invention can be used to treat hyperglycemia, and are expected to be useful for treating a variety of types of diabetes including diabetes mellitus type I, diabetes mellitus type II, or gestational diabetes, either insulin-dependent or non-insulin-dependent, and reducing complications of diabetes including nephropathy, retinopathy and vascular disease.

[0847] In some embodiments the terminal ten amino acids of Exendin-4 (i.e. the sequence of SEQ ID NO: 1319 (GPSSGAPPPS)) are linked to the carboxy terminus of a Class 4 peptide. These fusion proteins are anticipated to have pharmacological activity for suppressing appetite and inducing weight loss/weight maintenance. In accordance with some embodiments the Class 4 peptides disclosed herein can be further modified to include the amino acid sequence of SEQ ID NO: 1319 (GPSSGAPPPS) linked to amino acid 24 of the Class 4 peptide of SEQ ID NO: 1342 and administered to individuals to induce weight loss or assist in weight maintenance. More particularly, the Class 4 peptide comprises a sequence selected from the group consisting of SEQ ID NO: 1302, SEQ ID NO: 1303, SEQ ID NO: 1304 SEQ ID NO: 1305, SEQ ID NO: 1306, SEQ ID NO: 1307, SEQ ID NO: 1308, SEQ ID NO: 1336, SEQ ID NO: 1339, SEQ ID NO: 1340 SEQ ID NO: 1341, SEQ ID NO: 1342, SEQ ID NO: 1343 and SEQ ID NO: 1344 and further comprising the amino acid sequence of SEQ ID NO: 1319 (GPSSGAPPPS) linked to amino acid 24 of the Class 4 peptide is used to suppress appetite and inducing weight loss/weight maintenance. In some embodiments the administered Class 4 peptide comprises the sequence of SEQ ID NO: 1346 or SEQ ID NO: 1347.

[0848] Such methods for reducing appetite or promoting loss of body weight are expected to be useful in reducing body weight, preventing weight gain, or treating obesity of various causes, including drug-induced obesity, and reducing complications associated with obesity including vascular disease (coronary artery disease, stroke, peripheral vascular disease, ischemia reperfusion, etc.), hypertension, onset of diabetes type II, hyperlipidemia and musculoskeletal diseases.

[0849] The Class 4 peptides of the invention may be administered alone or in combination with other anti-diabetic or anti-obesity agents. Anti-diabetic agents known in the art or under investigation include insulin, sulfonylureas, such as tolbutamide (Orinase), acetohexamide (Dymelor), tolazamide (Tolinase), chlorpropamide (Diabinese), glipizide (Glucotrol), glyburide (Diabeta, Micronase, Glynase), glimepiride (Amaryl), or gliclazide (Diamicron); meglitinides, such as repaglinide (Prandin) or nateglinide (Starlix); biguanides such as metformin (Glucophage) or phenformin; thiazolidinediones such as rosiglitazone (Avandia), pioglitazone (Actos), or troglitazone (Rezulin), or other PPARγ inhibitors; alpha glucosidase inhibitors that inhibit carbohydrate digestion, such as miglitol (Glyset), acarbose (Precose/Glucobay); exenatide (Byetta) or pramlintide; Dipeptidyl peptidase-4 (DPP-4) inhibitors such as vildagliptin or sitagliptin; SGLT (sodium-dependent glucose transporter 1) inhibitors; or FBPase (fructose 1,6-bisphosphatase) inhibitors.

[0850] Anti-obesity agents known in the art or under investigation include appetite suppressants, including phenethylamine type stimulants, phentermine (optionally with fenfluramine or dexfenfluramine), diethylpropion (Tenuate®), phendimetrazine (Prelu-2®), Bontril®), benzphetamine (Didrex®), sibutramine (Meridia®, Reductil®); rimonabant (Acomplia®), other cannabinoid receptor antagonists; oxyntomodulin; fluoxetine hydrochloride (Prozac); Qnexa (topiramate and phentermine), Excalia (bupropion and zonisamide) or Contrave (bupropion and naltrexone); or lipase inhibitors, similar to xenical (Orlistat) or Cetilistat (also known as ATL-962), or GT 389-255.

[0851] The Class 4 peptides of the present invention can also be administered to patients suffering from catabolic wasting. It is estimated that over half of cancer patients experience catabolic wasting which is characterized by unintended and progressive weight loss, weakness, and low body fat and muscle. The syndrome is equally common in AIDS patients and can also be present in bacterial and parasitic diseases, rheumatoid arthritis, and chronic diseases of the bowel, liver, lungs, and heart. It is usually associated with anorexia and can manifest as a condition in aging or as a result of physical trauma. Catabolic wasting is a symptom that diminishes the quality of life, worsens the underlying condition, and is a major cause of death. Applicants anticipate that the Class 4 peptides disclosed herein can be administered to patients to treat catabolic wasting.

[0852] Pharmaceutical compositions comprising the Class 4 peptides disclosed herein can be formulated and administered to patients to using standard pharmaceutically acceptable carriers and routes of administration known to those skilled in the art. Accordingly the present disclosure also encompasses pharmaceutical compositions comprising one or more of the Class 4 peptides disclosed herein in combination with a pharmaceutically acceptable carrier. The pharmaceutical compositions may comprise the Class 4 peptides as the sole pharmaceutically active component, or the Class 4 peptides can be combined with one or more additional active agents. In accordance with some embodiments a composition is provided comprising a Class 4 peptide of the present invention and a compound that activates the GLP-1 receptor (such as GLP-1, a GLP-1 analog, an exendin-4 analog, or derivatives thereof). In accordance with some embodiments a composition is provided comprising a Class 4 peptide of the present invention and insulin or an insulin analog. Alternatively, a composition provided for inducing weight loss or preventing weight gain can be provided that comprises the sequence of SEQ ID NO: 1342 further comprising the amino acid sequence of SEQ ID NO: 1319 (GPSSGAPPPS) linked to amino acid 24 of SEQ ID NO: 1342, and an anti-obesity peptide. Suitable anti-obesity peptides include those disclosed in U.S. Pat. Nos. 5,691,309, 6,436,435 or US Patent application 20050176643, and including, but not limited to GLP-1, GIP (Gastric Inhibitory Polypeptide), MP1, PYY, MC-4, Leptin.

### Class 4 Peptide Structure

[0853] In some embodiments Class 4 glucagon related peptides are provided wherein the normally occurring aspartic acid at position nine (of glucagon, SEQ ID NO: 1301) has been substituted with glutamic acid or a cysteic acid-based derivative. More particularly, deletion of the first amino acid (des-His) and substitution of the aspartic acid at position 9 with glutamic acid, in some aspects, produces a Class 4 peptide. Class 4 glucagon related peptides having sulfonic acid substituents substituted at amino acid position nine of glucagon perform similarly to the carboxylic acid-based amino acids but with a few critical differences in relation to physical properties such as solubility. Homocysteic acid (hCysSO3) when substituted for the isosteric glutamic acid at position nine in the conventional des-His, Glu9 Class 4 peptide retains a partial antagonist and weak agonist.

[0854] In some embodiments there is provided a Class 4 peptide wherein the first two to five amino acids are removed, and position 9 (according to the numbering of SEQ ID NO: 1301) is replaced with hCys(SO3), homoglutamic acid, β-homoglutamic acid, or an alkylcarboxylate derivative of cysteine having the structure of:

[chemical structure]

wherein X5 is C1-C4 alkyl, C2-C4 alkenyl, or C₂-C₄ alkynyl, provides a compound that performs as a hormonal antagonist that is highly specific, potent and without contaminating agonist properties.

[0855] In accordance with some embodiments a Class 4 peptide is provided that comprises a glucagon peptide modified, relative to the wild type sequence of SEQ ID NO: 1301, by the deletion of two to five amino acid residues from the N-terminus and substitution of the aspartic acid residue at position nine of the native protein with a glutamic acid, homoglutamic acid, β-homoglutamic acid, a sulfonic acid derivative of cysteine, or an alkylcarboxylate derivative of cysteine having the structure of:

[chemical structure]

wherein X₅ is C1-C4 alkyl, C2-C4 alkenyl, or C2-C4 alkynyl.

[0856] In one specific embodiment, the Class 4 peptide comprising the deletion of two to five amino acid residues from the N-terminus and substitution of the Asp at position 9 of the native glucagon, is further modified by up to three amino acid modifications. For example, the Class 4 peptide may comprise one, two, or three conservative amino acid modifications. Alternatively or additionally, the Class 4 peptide may comprise one or more amino acid modifications selected from the group consisting of:

[0857] A. substitution of one or two amino acids at positions 10, 20, and 24, (according to the amino acid numbering of SEQ ID NO: 1301), or the N- or C-terminal amino acid of the Class 4 peptide with an amino acid covalently attached to an acyl group or alkyl group via an ester, ether, thioether, amide, or alkyl amine linkage;

[0858] B. substitution of one or two amino acids at positions 16, 17, 20, 21, and 24 (according to the amino acid numbering of SEQ ID NO: 1301), or the N- or C-terminal amino acid of the Class 4 peptide with an amino acid selected from the group consisting of: Cys, Lys, ornithine, homocysteine, and acetyl-phenylalanine (Ac-Phe), wherein the amino acid of the group is covalently bonded to a hydrophilic moiety;

[0859] C. addition of an amino acid covalently bonded to a hydrophilic moiety to the N- or C-terminus of the Class 4 peptide;

[0860] D. substitution of Asp at position 15 (according to the numbering of SEQ ID NO: 1301) with cysteic acid, glutamic acid, homoglutamic acid, and homocysteic acid;

[0861] E. substitution of Ser at position 16 (according to the numbering of SEQ ID NO: 1301) with cysteic acid, glutamic acid, homoglutamic acid, and homocysteic acid;

[0862] F. substitution with Aib at one or more of positions 16, 20, 21, and 24 according to the amino acid numbering of SEQ ID NO: 1301;

[0863] G. deletion of the amino acid at position 29 or the amino acids at positions 28 and 29, according to the numbering of SEQ ID NO: 1301;

[0864] H. substitution of each or both of the Asn at position 28 and the Thr at position 29 (according to the amino acid numbering of SEQ ID NO: 1301) with charged amino acids; and/or addition of one to two charged amino acids at the C-terminus of SEQ ID NO: 1301;

[0865] I. substitution of the Met at position 27 (according to the numbering of SEQ ID NO: 1301) with Leu or norleucine;

[0866] J. addition of a peptide having the amino acid sequence of any of SEQ ID NOs: 19-21 and 53 to the C-terminus of SEQ ID NO: 1301; wherein Thr at position 29 (according to the numbering of SEQ ID NO: 1301) is Thr or Gly; and

[0867] K. replacement of the C-terminal carboxylate with an amide or ester.

[0868] In a specific embodiment, the Class 4 peptide comprises an amino acid modification of A, B, or C, as described above, or a combination thereof. In yet another specific embodiment, the Class 4 peptide further comprises an amino acid modification of any of D to K as described above, or a combination thereof, in addition to the amino acid modification(s) of A, B, and/or C.

[0869] In some embodiments the Class 4 peptide comprises a glucagon peptide, wherein the first 5 amino acids have been removed from the N-terminus, and the remaining N-terminal amino group has been replaced with a hydroxyl group (the “PLA6 analog”), producing the peptide of SEQ ID NO: 1339. Applicants have found that substitution of phenyl-lactic acid for phenylalanine in Class 4 peptide analogs that have the first five amino acids deleted and substitution of a glutamic acid at position 9 (relative to native glucagon) further enhances the potency of those Class 4 peptide analogs.

[0870] In some embodiments the Class 4 peptide of SEQ ID NO: 1339 is further modified by substituting the aspartic acid residue at position four (position 9 of the native glucagon) with an amino acid of the general structure:

[chemical structure]

wherein X₆ is C1-C3 alkyl, C2-C3 alkene or C2-C3 alkynyl, and in some embodiments X6 is C1-C3 alkyl, and in another embodiment X6 is C2 alkyl. In some embodiments the Class 4 peptide comprises a glucagon peptide, wherein the first 5 amino acids have been removed from the N-terminus, and the aspartic acid residue at position four (position 9 of the native glucagon) has been substituted with cysteic acid or homocysteic acid. In some embodiments the Class 4 peptide comprises a glucagon peptide comprising an amino acid sequence selected from the group consisting of SEQ ID NO: 1339, SEQ ID NO: 1307 and SEQ ID NO: 1308. In some embodiments the Class 4 peptide comprises an amino acid sequence selected from the group consisting of SEQ ID NO: 1308, wherein the amino acid at position four is homocysteic acid.

[0871] In another embodiment, the Class 4 peptide of SEQ ID NO: 1339 is further modified by substituting the aspartic acid residue at position four (position 9 of the native glucagon) with glutamic acid, homoglutamic acid, β-homoglutamic acid, or an alkylcarboxylate derivative of cysteine having the structure of:

[chemical structure]

wherein X₅ is C1-C4 alkyl, C2-C4 alkenyl, or C2-C4 alkynyl. In a specific embodiment, X₅ is C1 or C2 alkyl.

[0872] However, applicants have discovered that with the substitution of the N-terminal phenylalanine with PLA in a des1-5 glucagon analog (i.e., a glucagon analog having the first five amino acids deleted), further substitution of the native aspartic acid residue at position four (position 9 of the native glucagon) is not required to produce an analog that exhibits pure antagonism. This result is surprising in light of the prior art teachings that the native aspartic acid residue at position four must substituted to produce high affinity and potent antagonists of glucagon (2-29) analogs. The use of the PLA substitution improves the relative potency of the Asp9 analog to a point comparable to that of the Glu9 and hCys(SO₃H)9 analogs.

[0873] Substitution of the phenylalanine residue with other phenylalanine analogs, including 3,4-2F-phenylalnine (3,4-2F-Phe), 2-naphthyalanine (2-NaI), N-acyl-phenylalanine (Ac-Phe), alpha-methylhydrocinnamic acid (MCA) and benzylmalonic acid (BMA) did not perform as potently as the PLA substitution.

[0874] Substituting PLA at sites other than at position six (according to the amino acid numbering of native glucagon), including at positions 4 and 5 reveals that the PLA6 analog is an appreciably more potent antagonist than glucagon analogs having a slightly extended N-terminus. The present invention also includes analogs wherein the N-terminal amino group is substituted with an acylated and alkylated “O-terminal” peptides.

[0875] Furthermore, the PLA6 substitution not only increases the potency of the antagonist but also serves a critical role in pegylation. The PLA6 analogs can be selectively pegylated without restoration of glucagon agonism. In the absence of the PLA substitution, pegylation of the analog surprisingly induces glucagon agonism. This glucagon agonism is not seen in the pegylated PLA6 analogs. Several sites for pegylation were investigated including positions 3, 6 and 19 (positions 8, 11 and 19 of native glucagon) and at the N-terminal amino acid residue. In some embodiments the pegylation is at position 19 (position 24 of native glucagon) as that site exhibits the most potent and selective glucagon antagonism.

[0876] In some embodiments, the Class 4 peptide comprises the general structure of A-B-C, wherein A is selected from the group consisting of:

[0877] (i) phenyl lactic acid (PLA);

[0878] (ii) an oxy derivative of PLA;

[0879] (iii) a peptide of 2 to 6 amino acids in which two consecutive amino acids of the peptide are linked via an ester or ether bond;

B represents amino acids i to 26 of SEQ ID NO: 1301, wherein i is 3, 4, 5, 6, or 7, optionally comprising one or more amino acid modifications selected from the group consisting of:

[0880] (iv) Asp at position 9 (according to the amino acid numbering of SEQ ID NO: 1301) is substituted with a Glu, a sulfonic acid derivative of Cys, homoglutamic acid, β-homoglutamic acid, or an alkylcarboxylate derivative of cysteine having the structure of:

[chemical structure]

[0881] wherein X5 is C1-C4 alkyl, C2-C4 alkenyl, or C2-C4 alkynyl.

[0882] (v) substitution of one or two amino acids at positions 10, 20, and 24, (according to the amino acid numbering of SEQ ID NO: 1301) with an amino acid covalently attached to an acyl or alkyl group via an ester, ether, thioether, amide, or alkyl amine linkage;

[0883] (vi) substitution of one or two amino acids at positions 16, 17, 20, 21, and 24 (according to the amino acid numbering of SEQ ID NO: 1301) with an amino acid selected from the group consisting of: Cys, Lys, ornithine, homocysteine, and acetyl-phenylalanine (Ac-Phe), wherein the amino acid of the group is covalently attached to a hydrophilic moiety;

[0884] (vii) Asp at position 15 (according to the numbering of SEQ ID NO: 1301) is substituted with cysteic acid, glutamic acid, homoglutamic acid, and homocysteic acid;

[0885] (viii) Ser at position 16 (according to the numbering of SEQ ID NO: 1301) is substituted with cysteic acid, glutamic acid, homoglutamic acid, and homocysteic acid;

[0886] (ix) substitution with Aib at one or more of positions 16, 20, 21, and 24 according to the amino acid numbering of SEQ ID NO: 1301;

and C is selected from the group consisting of:

[0887] (x) X;

[0888] (xi) X—Y;

[0889] (xii) X—Y—Z; and

[0890] (xiii) X—Y—Z—R10,

[0891] wherein X is Met, Leu, or Nle; Y is Asn or a charged amino acid; Z is Thr, Gly, Cys, Lys, ornithine (Orn), homocysteine, acetyl phenylalanine (Ac-Phe), or a charged amino acid; wherein R10 is selected from a group consisting of SEQ ID NOs: 1319-1321 and 1353; and

[0892] (xiv) any of (x) to (xiii) in which the C-terminal carboxylate is replaced with an amide.

[0893] In a specific aspect, the Class 4 peptide comprises an oxy derivative of PLA. As used herein “oxy derivative of PLA” refers to a compound comprising a modified structure of PLA in which the hydroxyl group has been replaced with O—R₁₁, wherein R₁₁ is a chemical moiety. In this regard, the oxy derivative of PLA can be, for example, an ester of PLA or an ether of PLA.

[0894] Methods of making oxy derivatives of PLA are known in the art. For example, when the oxy derivative is an ester of PLA, the ester may be formed by upon reaction of the hydroxyl of PLA with a carbonyl bearing a nucleophile. The nucleophile can be any suitable nucleophile, including, but not limited to an amine or hydroxyl. Accordingly, the ester of PLA can comprise the structure of Formula IV:

[chemical structure]

wherein R₇ is an ester formed upon reaction of the hydroxyl of PLA with a carbonyl bearing a nucleophile.

[0895] The carbonyl bearing a nucleophile (which reacts with the hydroxyl of PLA to form an ester) can be, for example, a carboxylic acid, a carboxylic acid derivative, or an activated ester of a carboxylic acid. The carboxylic acid derivative can be, but is not limited to, an acyl chloride, an acid anhydride, an amide, an ester, or a nitrile. The activated ester of a carboxylic acid can be, for example, N-hydroxysuccinimide (NHS), tosylate (Tos), a carbodiimide, or a hexafluorophosphate. In some embodiments, the carbodiimide is 1,3-dicyclohexylcarbodiimide (DCC), 1,1′-carbonyldiimidazole (CDI), 1-ethyl-3-(3-dimethylaminopropyl)carbodiimide hydrochloride (EDC), or 1,3-diisopropylcarbodiimide (DICD). In some embodiments, the hexafluorophosphate is selected from a group consisting of hexafluorophosphate benzotriazol-1-yl-oxy-tris(dimethylamino)phosphonium hexafluorophosphate (BOP), benzotriazol-1-yl-oxytripyrrolidinophosphonium hexafluorophosphate (PyBOP), 2-(1H-7-azabenzotriazol-1-yl)-1,1,3,3-tetramethyl uronium hexafluorophosphate (HATU), and o-benzotriazole-N,N,N′,N′-tetramethyl-uronium-hexafluoro-phosphate (HBTU).

[0896] Methods of making ethers from reaction with a hydroxyl group (e.g., the hydroxyl of PLA) also are known in the art. For example, the hydroxyl group of PLA may be reacted with a halogenated alkyl or tosylated alkyl alcohol to form an ether bond.

[0897] Generally, the chemical moiety of R₁₁ is one which does not decrease the activity of the Class 4 peptide. In some embodiments, the chemical moiety enhances the activity, stability, and/or solubility of the Class 4 peptide.

[0898] In a specific embodiment, the chemical moiety bound to PLA via an oxygen-containing bond (e.g., via an ester or ether bond) is a polymer (e.g., a polyalkylene glycol), a carbohydrate, an amino acid, a peptide, or a lipid, e.g., a fatty acid or a steroid.

[0899] In a specific embodiment, the chemical moiety is an amino acid, which, optionally, is a part of a peptide, such that Formula IV is a depsipeptide. In this regard, PLA may be at a position other than the N-terminal amino acid residue of the Class 4 peptide, such that the Class 4 peptide comprises one or more (e.g., 1, 2, 3, 4, 5, 6, or more) amino acids N-terminal to the PLA residue. For example, the Class 4 peptide can comprise PLA at position n, wherein n is 2, 3, 4, 5, or 6 of the Class 4 peptide.

[0900] The amino acids N-terminal to the PLA residue may be synthetic or naturally-occurring. In a specific embodiment, the amino acids which are N-terminal PLA are naturally-occurring amino acids. In some embodiments, the amino acids which are N-terminal to PLA are the N-terminal amino acids of native glucagon. For example, the Class 4 peptide can comprise at the N-terminus the amino acid sequence of any of SEQ ID NOs: 1354-1358, wherein PLA is linked to threonine via an ester bond:

| | |
|---|---|
| SEQ ID NO: 1354 | His-Ser-Gln-Gly-Thr-PLA |
| SEQ ID NO: 1355 | Ser-Gln-Gly-Thr-PLA |
| SEQ ID NO: 1356 | Gln-Gly-Thr-PLA |
| SEQ ID NO: 1357 | Gly-Thr-PLA |
| SEQ ID NO: 1358 | Thr-PLA |

[0901] In an alternative embodiment, one or more of the N-terminal amino acids may be substituted with an amino acid other than the amino acid of native glucagon. For example, when the Class 4 peptide comprises PLA as the amino acid at position 5 or 6, the amino acid at position 1 and/or position 2 may be an amino acid which reduces susceptibility to cleavage by dipeptidyl peptidase IV. More particularly, in some embodiments, position 1 of the Class 4 peptide is an amino acid selected from the group consisting of D-histidine, alpha, alpha-dimethyl imidazole acetic acid (DMIA), N-methyl histidine, alpha-methyl histidine, imidazole acetic acid, desaminohistidine, hydroxyl-histidine, acetyl-histidine and homo-histidine. More particularly, in some embodiments, position 2 of the antagonist peptide is an amino acid selected from the group consisting of D-serine, D-alanine, valine, glycine, N-methyl serine, N-methyl alanine, and aminoisobutyric acid (Aib). Also, for example, when the Class 4 peptide comprises PLA as the amino acid at position 4, 5, or 6, the amino acid at position 3 of the Class 4 peptide may be glutamic acid, as opposed to the native glutamine residue of native glucagon. In an exemplary embodiment of the invention, the Class 4 peptide comprises at the N-terminus the amino acid sequence of any of SEQ ID NOs: 1359-1361.

[0902] With respect to the Class 4 peptides comprising a compound of Formula IV, the polymer may be any polymer, provided that it can react with the hydroxyl group of PLA. The polymer may be one that naturally or normally comprises a carbonyl bearing a nucleophile. Alternatively, the polymer may be one which was derivatized to comprise the carbonyl bearing the carbonyl. The polymer may be a derivatized polymer of any of: polyamides, polycarbonates, polyalkylenes and derivatives thereof including, polyalkylene glycols, polyalkylene oxides, polyalkylene terepthalates, polymers of acrylic and methacrylic esters, including poly(methyl methacrylate), poly(ethyl methacrylate), poly(butylmethacrylate), poly(isobutyl methacrylate), poly(hexylmethacrylate), poly(isodecyl methacrylate), poly(lauryl methacrylate), poly(phenyl methacrylate), poly(methyl acrylate), poly(isopropyl acrylate), poly(isobutyl acrylate), and poly(octadecyl acrylate), polyvinyl polymers including polyvinyl alcohols, polyvinyl ethers, polyvinyl esters, polyvinyl halides, poly(vinyl acetate), and polyvinylpyrrolidone, polyglycolides, polysiloxanes, polyurethanes and co-polymers thereof, celluloses including alkyl cellulose, hydroxyalkyl celluloses, cellulose ethers, cellulose esters, nitro celluloses, methyl cellulose, ethyl cellulose, hydroxypropyl cellulose, hydroxy-propyl methyl cellulose, hydroxybutyl methyl cellulose, cellulose acetate, cellulose propionate, cellulose acetate butyrate, cellulose acetate phthalate, carboxylethyl cellulose, cellulose triacetate, and cellulose sulphate sodium salt, polypropylene, polyethylenes including poly(ethylene glycol), poly(ethylene oxide), and poly(ethylene terephthalate), and polystyrene.

[0903] The polymer can be a biodegradable polymer, including a synthetic biodegradable polymer (e.g., polymers of lactic acid and glycolic acid, polyanhydrides, poly(ortho)esters, polyurethanes, poly(butic acid), poly(valeric acid), and poly(lactide-cocaprolactone)), and a natural biodegradable polymer (e.g., alginate and other polysaccharides including dextran and cellulose, collagen, chemical derivatives thereof (substitutions, additions of chemical groups, for example, alkyl, alkylene, hydroxylations, oxidations, and other modifications routinely made by those skilled in the art), albumin and other hydrophilic proteins (e.g., zein and other prolamines and hydrophobic proteins)), as well as any copolymer or mixture thereof. In general, these materials degrade either by enzymatic hydrolysis or exposure to water in vivo, by surface or bulk erosion.

[0904] The polymer can be a bioadhesive polymer, such as a bioerodible hydrogel described by H. S. Sawhney, C. P. Pathak and J. A. Hubbell in Macromolecules, 1993, 26, 581-587, the teachings of which are incorporated herein, polyhyaluronic acids, casein, gelatin, glutin, polyanhydrides, polyacrylic acid, alginate, chitosan, poly(methyl methacrylates), poly(ethyl methacrylates), poly(butylmethacrylate), poly(isobutyl methacrylate), poly(hexylmethacrylate), poly(isodecyl methacrylate), poly(lauryl methacrylate), poly(phenyl methacrylate), poly(methyl acrylate), poly(isopropyl acrylate), poly(isobutyl acrylate), and poly(octadecyl acrylate).

[0905] In some embodiments, the polymer is a water-soluble polymer. Suitable water-soluble polymers are known in the art and include, for example, polyvinylpyrrolidone, hydroxypropyl cellulose (HPC; Klucel), hydroxypropyl methylcellulose (HPMC; Methocel), nitrocellulose, hydroxypropyl ethylcellulose, hydroxypropyl butylcellulose, hydroxypropyl pentylcellulose, methyl cellulose, ethylcellulose (Ethocel), hydroxyethyl cellulose, various alkyl celluloses and hydroxyalkyl celluloses, various cellulose ethers, cellulose acetate, carboxymethyl cellulose, sodium carboxymethyl cellulose, calcium carboxymethyl cellulose, vinyl acetate/crotonic acid copolymers, poly-hydroxyalkyl methacrylate, hydroxymethyl methacrylate, methacrylic acid copolymers, polymethacrylic acid, polymethylmethacrylate, maleic anhydride/methyl vinyl ether copolymers, poly vinyl alcohol, sodium and calcium polyacrylic acid, polyacrylic acid, acidic carboxy polymers, carboxypolymethylene, carboxyvinyl polymers, polyoxyethylene polyoxypropylene copolymer, polymethylvinylether co-maleic anhydride, carboxymethylamide, potassium methacrylate divinylbenzene co-polymer, polyoxyethyleneglycols, polyethylene oxide, and derivatives, salts, and combinations thereof.

[0906] In a specific embodiment, the polymer is a polyalkylene glycol, including, for example, polyethylene glycol (PEG).

[0907] The carbohydrate may be any carbohydrate provided that it comprises or is made to comprise a carbonyl with an alpha leaving group. The carbohydrate, for example, may be one which has been derivatized to comprise a carbonyl with an alpha leaving group. In this regard, the carbohydrate may be a derivatized form of a monosaccharide (e.g., glucose, galactose, fructose), a disaccharide (e.g., sucrose, lactose, maltose), an oligosaccharide (e.g., raffinose, stachyose), a polysaccharide (a starch, amylase, amylopectin, cellulose, chitin, callose, laminarin, xylan, mannan, fucoidan, galactomannan.

[0908] With respect to the Class 4 peptides comprising a compound of Formula IV, the lipid may be any lipid comprising a carbonyl with an alpha leaving group. The lipid, for example, may be one which is derivatized to comprise the carbonyl. In this regard, the lipid, may be a derivative of a fatty acid (e.g., a C4-C30 fatty acid, eicosanoid, prostaglandin, leukotriene, thromboxane, N-acyl ethanolamine), glycerolipid (e.g., mono-, di-, tri-substituted glycerols), glycerophospholipid (e.g., phosphatidylcholine, phosphatidylinositol, phosphatidylethanolamine, phosphatidylserine), sphingolipid (e.g., sphingosine, ceramide), sterol lipid (e.g., steroid, cholesterol), prenol lipid, saccharolipid, or a polyketide. In some embodiments, the lipid is a oil, wax, cholesterol, sterol, fat-soluble vitamin, monoglyceride, diglyceride, triglyceride, a phospholipid.

[0909] In some embodiments, R₇ has a molecular weight of about 100 kDa or less, e.g., about 90 kDa or less, about 80 kDa or less, about 70 kDa or less, about 60 kDa or less, about 50 kDa or less, about 40 kDa or less. Accordingly, R7 can have a molecular weight of about 35 kDa or less, about 30 kDa or less, about 25 kDa or less, about 20 kDa or less, about 15 kDa or less, about 10 kDa or less, about 5 kDa or less, or about 1 kDa.

[0910] In an alternative embodiment, the Class 4 peptide comprises as A, a peptide of 2 to 6 amino acids in which two consecutive amino acids of the peptide are linked via an ester or ether bond. The ester or ether bond may be, e.g., between amino acids 2 and 3, 3 and 4, 4 and 5, or 5 and 6. Optionally the peptide may be further modified by covalent linkage to another chemical moiety including linkage to a polymer (e.g. a hydrophilic polymer), alkylation, or acylation.

[0911] With regard to the Class 4 peptide comprising the general structure A-B-C, B represents amino acids of native glucagon, e.g., i to 26 of SEQ ID NO: 1301, wherein i is 3, 4, 5, 6, or 7, optionally comprising one or more amino acid modifications. In a specific embodiment, B represents amino acids 7 to 26 of SEQ ID NO: 1301, optionally further modified.

[0912] In some embodiments, B is modified by up to three amino acid modifications. For example, B, which represents native amino acid sequence of SEQ ID NO: 1301 is modified by one or more conservative amino acid modifications.

[0913] In another embodiment, B comprises one or more amino acid modifications selected from the group consisting of (iv) to (ix), as described herein. In a specific embodiment, B comprises one or both of the amino acid modifications (v) and (vi). In a further specific embodiment, B comprises one or a combination of amino acid modifications selected from the group consisting of (iv), (vii), (viii), and (ix), in addition to (v) and (vi).

[0914] In another specific embodiment, the Class 4 peptide comprises one or more charged amino acids at the C-terminus. For example, Y and/or Z can be a charged amino acid, e.g., Lys, Arg, H is, Asp, and Glu. In yet another embodiment, the Class 4 peptide comprises one to two charged amino acids (e.g., Lys, Arg, H is, Asp, and Glu) C-terminal to Z. In a specific aspect, Z followed by one to two charged amino acids does not comprise R10.

[0915] The Class 4 peptide in some embodiments comprises a hydrophilic moiety covalently bound to an amino acid residue of the Class 4 peptide, as described herein. For example, the Class 4 peptide can comprise a hydrophilic moiety covalently attached to an amino acid at position 1, 16, 20, 21, or 24 according to the numbering of SEQ ID NO: 1301. In another embodiment, the hydrophilic moiety is attached to the C-terminal amino acid of the Class 4 peptide, which in some cases, is 1 or 11 amino acids C-terminal to Z. In yet another embodiment, the hydrophilic moiety is attached to PLA, when A is PLA, PLA-Phe, or PLA-Thr-Phe, wherein PLA is modified to comprise the hydrophilic moiety. In another embodiment, an amino acid comprising a hydrophilic moiety is added to the N- or C-terminus of the Class 4 peptide. In another embodiment, the Class 4 peptide comprises an acyl group or alkyl group as described herein. For example, the acylation or alkylation can occur off the side chain of the amino acid at position 10, 20, or 24, according to the numbering of SEQ ID NO: 1301. In an alternative embodiment, the acylation or alkylation occurs off the side chain of the C-terminal amino acid of the Class 4 peptide, which in some cases, is 1 or 11 amino acids C-terminal to Z. In yet another embodiment, when A is PLA, PLA-Phe, or PLA-Thr-Phe, the PLA is modified to comprise an acyl or alkyl group.

### Exemplary Embodiments

[0916] The Class 4 peptide may comprise any amino acids, synthetic or naturally occurring, provided that at least two consecutive amino acids of the peptide are linked via an ester or ether bond. In a specific embodiment, the peptide comprises amino acids of native glucagon. For example, the peptide can comprise j to 6 of native glucagon (SEQ ID NO: 1301), wherein j is 1, 2, 3, 4, or 5. Alternatively, the peptide can comprise an amino acid sequence based on the N-terminus of SEQ ID NO: 1301 with one or more amino acid modifications. The amino acid at position 1 and/or position 2 may be an amino acid which reduces susceptibility to cleavage by dipeptidyl peptidase IV. For instance, the peptide can comprise at position 1 of the Class 4 peptide an amino acid selected from the group consisting of D-histidine, alpha, alpha-dimethyl imidazole acetic acid (DMIA), N-methyl histidine, alpha-methyl histidine, imidazole acetic acid, desaminohistidine, hydroxyl-histidine, acetyl-histidine and homo-histidine. More particularly, in some embodiments, position 2 of the antagonist peptide is an amino acid selected from the group consisting of D-serine, D-alanine, valine, glycine, N-methyl serine, N-methyl alanine, and aminoisobutyric acid (Aib). Also, for example, the amino acid at position 3 of the Class 4 peptide may be glutamic acid, as opposed to the native glutamine residue of native glucagon. Accordingly, the Class 4 peptide can comprise an amino acid sequence of:

| | |
|---|---|
| Xaa1-Xaa2-Xaa3-Thr-Gly-Phe; | (SEQ ID NO: 1368) |
| Xaa2-Xaa3-Thr-Gly-Phe; | (SEQ ID NO: 1369) |
| or | |
| Xaa3-Thr-Gly-Phe; | (SEQ ID NO: 1370) |

wherein Xaa1 is selected from a group consisting of: H is, D-histidine, alpha, alpha-dimethyl imidazole acetic acid (DMIA), N-methyl histidine, alpha-methyl histidine, imidazole acetic acid, desaminohistidine, hydroxyl-histidine, acetyl-histidine and homo-histidine; Xaa2 is selected from a group consisting of: Ser, D-serine, D-alanine, valine, glycine, N-methyl serine, N-methyl alanine, and aminoisobutyric acid (Aib); and Xaa3 is Gln or Glu.

[0917] The present invention also encompasses embodiments wherein the C-terminal amino acid of the Class 4 peptides have an amide group substituting for the carboxylic acid group that is present on the native amino acid.

[0918] In some embodiments, wherein the Class 4 peptide is PEGylated, the Class 4 peptide comprises the shortened glucagon peptides, specifically 6-29 where the “N-terminal” amino acid is PLA (phenyl-lactic acid). Such glucagon derivatives exhibit unique virtues. They are more potent peptides than those with the native N-terminal phenylalanine and they suppress any glucagon agonism that results from pegylation, something not seen with the native phenylalanine. Finally, while the current literature establishes that a substitution of the native aspartic acid at position 9 is required for antagonist activity, applicants have discovered the surprising result that such a substitution is no longer required in the PLA6-(6-29) glucagon analogs.

[0919] In some embodiments an amino acid of the Class 4 peptide is substituted with at least one cysteine residue, wherein the side chain of the cysteine residue is further modified with a thiol reactive reagent, including for example, maleimido, vinyl sulfone, 2-pyridylthio, haloalkyl, and haloacyl. These thiol reactive reagents may contain carboxy, keto, hydroxyl, and ether groups as well as other hydrophilic moieties such as polyethylene glycol units. In an alternative embodiment, an amino acid of the Class 4 peptide is substituted with lysine, and the side chain of the substituting lysine residue is further modified using amine reactive reagents such as active esters (succinimido, anhydride, etc) of carboxylic acids or aldehydes of hydrophilic moieties such as polyethylene glycol. In accordance with some embodiments the lysine residue corresponding to position 12 of the native peptide is substituted with arginine and a single lysine substitution is inserted for one of the amino acids corresponding to position 1, 16, 17, 20, 21, 24 or 29 of the native peptide, or a lysine is added to the N- or C-terminus of the Class 4 peptide.

[0920] In another embodiment the methionine residue corresponding to position 27 of the native peptide is changed to leucine or norleucine to prevent oxidative degradation of the peptide.

[0921] In some embodiments, the Class 4 peptides described herein are further modified by truncation or deletion of one or two amino acids of the C-terminus of the glucagon peptide (i.e., truncation of the amino acid at position 29 or at positions 28 and 29 of native glucagon) without affecting activity and/or potency at the glucagon receptor. In this regard, the Class 4 peptide described herein can, for example, consist essentially of or consist of amino acids 1-27, 1-28, 2-27, 2-28, 3-27, 3-28, 4-27, 4-28, 5-27, 5-28, 6-27, or 6-28 of the native glucagon peptide (SEQ ID NO: 1301) with one or more modifications resulting in Class 4 peptidic activity as described herein.

[0922] The presently disclosed Class 4 peptides also encompass amino acid substitutions at positions that are known not to be critical to the function of the glucagon peptide. In some embodiments the substitutions are conservative amino acid substitutions at one, two or three positions selected from the group consisting of 2, 5, 6, 7, 8, 9, 12, 13, 14, 15, 16, 19, 22, 23 or 24 of SEQ ID NO: 1339. In some embodiments the Class 4 peptide comprises a derivative peptide of SEQ ID NO: 1342 wherein the glucagon peptide comprises a further amino acid substitution relative to SEQ ID NO: 1342 at one to three amino acid positions selected from positions 2, 5, 6, 8, 9, 12, 13 and 14. In some embodiments the substitutions at positions 2, 5, 6, 8, 9, 12, 13 and 14 of SEQ ID NO: 1342 are conservative amino acid substitutions. In some embodiments the amino acids corresponding to positions 16, 17, 20, 21, 24 or 29 of the native peptide, and more particularly at position 21 and/or 24 are substituted with cysteine or lysine, wherein a PEG chain is covalently attached to the substituted cysteine or lysine residue.

[0923] In accordance with some embodiments the modified Class 4 peptide comprises two or more polyethylene glycol chains covalently bound to the peptide wherein the total molecular weight of the glucagon chains is about 1,000 to about 5,000 Daltons. In some embodiments the pegylated Class 4 peptide comprises a peptide selected from the group consisting of SEQ ID NO: 1312, and SEQ ID NO: 1322, wherein said peptide comprise a polyethylene glycol chain linked to the amino acid at positions 11 and 19 and the combined molecular weight of the two PEG chains is about 1,000 to about 5,000 Daltons.

[0924] In accordance with some embodiments a Class 4 peptide is provided comprising a modified glucagon peptide selected from the group consisting of:

(SEQ ID NO: 1309)
R₁-Phe-Thr-Ser-Xaa-Tyr-Ser-Xaa-Tyr-Leu-Xaa-Xaa-Arg-Arg-Ala-Gln-Asp-Phe-Val-
Gln-Trp-Leu-Xaa-Asn-Thr-R₂,
(SEQ ID NO: 1310)
R₁-Phe-Thr-Ser-Xaa-Tyr-Ser-Xaa-Tyr-Leu-Asp-Ser-Arg-Arg-Ala-Gln-Xaa-Phe-Val-Gln-
Trp-Leu- Xaa-Asn-Thr-R₂,
(SEQ ID NO: 1311)
R₁-Phe-Thr-Ser-Xaa-Tyr-Ser-Xaa-Tyr-Leu-Asp-Ser-Arg-Arg-Ala-Gln-Asp-Phe-Val-
Xaa-Trp-Leu-Xaa-Asn-Thr-R₂
and
(SEQ ID NO: 1312)
R₁-Phe-Thr-Ser-Xaa-Tyr-Ser-Xaa-Tyr-Leu-Asp-Ser-Arg-Arg-Ala-Gln-Xaa-Phe-Val-
Xaa-Trp-Leu-Xaa-Asn-Thr-R₂,

wherein Xaa at position 4=aspartic acid, glutamic acid, cysteic acid or homocysteic acid, Xaa at position 7=Lys or Arg, Xaa at position 10 is aspartic acid, cysteic acid, glutamic acid, homoglutamic acid and homocysteic acid; Xaa at position 11 is Ser, Lys, Cys, Orn, homocysteine or acetyl phenylalanine, Xaa at position 16 is Asp, Lys, Cys, Orn, homocysteine or acetyl phenylalanine a and Xaa at position 19 is Gln, Lys, Cys, Orn, homocysteine and acetyl phenylalanine, Xaa at position 22=Met, Leu or Nle, R1 is OH or NH₂, and R₂ is COOH or CONH₂, wherein the peptide is pegylated at position 11 for SEQ ID NO: 1309, at position 16 for SEQ ID NO: 1310, position 19 for SEQ ID NO: 1311 and at positions 16 and 19 of SEQ ID NO: 1312, with the proviso that when Xaa at position 4=aspartic acid then R₁ is OH. In accordance with some embodiments the peptide comprises the sequence of SEQ ID NO: 1309, SEQ ID NO: 1310 or SEQ ID NO: 1311, wherein R₁ is OH and R₂ is CONH₂. In some embodiments the peptide comprises the sequence of SEQ ID NO: 1309, SEQ ID NO: 1310 or SEQ ID NO: 1311, wherein R₁ is OH, R₂ is CONH₂ and the amino acid at position 4 is aspartic acid, and in a further embodiment such peptides comprise a carboxy terminal extension comprising the sequence of SEQ ID NO: 1319.

[0925] In accordance with some embodiments the peptide comprises a sequence selected from the group consisting of SEQ ID NO: 1309, SEQ ID NO: 1310, SEQ ID NO: 1313, SEQ ID NO: 1314, and SEQ ID NO: 1316, wherein the peptide is pegylated at position 11 for SEQ ID NO: 1309 and SEQ ID NO: 1313, pegylated at position 16 for SEQ ID NO: 1310, and pegylated at position 19 for SEQ ID NO: 1310 and SEQ ID NO: 1314. In some embodiments the glucagon agonist comprises the peptide of SEQ ID NO: 1313 or SEQ ID NO: 1314. In some embodiments the C-terminal amino acid of the Class 4 peptides disclosed herein have an amide group in place of the carboxylic acid group that is present on the native amino acid. In accordance with some embodiments the Class 4 peptide comprises the sequence of SEQ ID NO: 1318.

[0926] In accordance with some embodiments, a Class 4 peptide is provided wherein a plasma protein has been covalently linked to an amino acid side chain of the peptide to improve the solubility, stability and/or pharmacokinetics of the glucagon peptide. For example, serum albumin can be covalently bound to the Class 4 peptides presented herein. In some embodiments the plasma protein is covalently bound to an amino acid corresponding to position 16, 17, 20, 21, 24 or 29 of the native glucagon peptide. More particularly, in some embodiments the plasma protein is bound to an amino acid corresponding to position 16 or 24 of the native glucagon peptide, wherein the Class 4 peptide comprises the sequence of SEQ ID NO: 1303, SEQ ID NO: 1304, SEQ ID NO: 1305, SEQ ID NO: 1306, SEQ ID NO: 1307, SEQ ID NO: 1308, SEQ ID NO: 1309, SEQ ID NO: 1311, SEQ ID NO: 1312, SEQ ID NO: 1322, SEQ ID NO: 1323, SEQ ID NO: 1324, SEQ ID NO: 1325, SEQ ID NO: 1326, SEQ ID NO: 1327, SEQ ID NO: 1328, SEQ ID NO: 1336 and SEQ ID NO: 1339. In some embodiments the Class 4 peptide comprises a peptide selected from the group consisting of SEQ ID NO: 1309, SEQ ID NO: 1310, SEQ ID NO: 1311 and SEQ ID NO: 1312.

[0927] In accordance with some embodiments, a Class 4 peptide is provided wherein a linear amino acid sequence representing the Fc portion of an immunoglobin molecule has been covalently linked to an amino acid side chain of a Class 4 peptide disclosed herein to improve the solubility, stability and/or pharmacokinetics of the glucagon peptide. For example, the amino acid sequence representing the Fc portion of an immunoglobin molecule can be covalently bound to position 11, 12, 15, 16, 19, 21 or 24 of the glucagon peptide of SEQ ID NO: 1307, SEQ ID NO: 1339, or a glucagon analog thereof. In some embodiments the Fc peptide is covalently bound to position 11 or 19 of the Class 4 peptide of SEQ ID NO: 1306, SEQ ID NO: 1307, SEQ ID NO: 1308 or SEQ ID NO: 1336. The Fc portion is usually isolated from IgG, but the Fc peptide fragment from any immunoglobin should function equivalently. In some embodiments the glucagon peptide is selected from the group consisting of SEQ ID NO: 1303, SEQ ID NO: 1304, SEQ ID NO: 1305, SEQ ID NO: 1307 SEQ ID NO: 1308, and SEQ ID NO: 1339, wherein the Fc portion is linked to the corresponding position of 16, 17, 20, 21, 24 or 29 of the native glucagon peptide. In some embodiments the Class 4 peptide comprises a glucagon peptide selected from the group consisting of SEQ ID NO: 1309, SEQ ID NO: 1310, SEQ ID NO: 1311 and SEQ ID NO: 1312, wherein the Fc peptide is bound to the side chain of the amino acid located at position 11, 16 or 19 of SEQ ID NO: 1309, SEQ ID NO: 1310, SEQ ID NO: 1311, respectively, and at both positions 11 and 19 for SEQ ID NO: 1312.

[0928] In certain embodiments of the invention, the Class 4 peptide comprises the amino acid sequence of any of SEQ ID NOs: 1362, 1364-1367, and 1371.

### Modifications to Improve Solubility

[0929] The Class 4 peptides can be further modified to improve the peptide's solubility in aqueous solutions at physiological pH, while, in some aspects retaining a glucagon antagonist activity. Introduction of hydrophilic groups at positions corresponding to positions 1, 16, 17, 20, 21, 24 and 29 of the native peptide, or at the C-terminus, can improve the solubility of the resulting Class 4 peptide in solutions having a physiological pH, while retaining the parent compounds antagonist activity. Therefore, in some embodiments the presently disclosed Class 4 peptides are further modified to comprise one or more hydrophilic groups covalently linked to the side chains of amino acids corresponding to amino acid positions 1, 16, 17, 20, 21, 24 and 29 of the native glucagon peptide or of the N- or C-terminal amino acid. In a further embodiment the side chains of amino acids corresponding to amino acid positions 16 and 24 of the native glucagon peptide are covalently bound to hydrophilic groups, and in some embodiments the hydrophilic group is polyethylene glycol (PEG).

[0930] Applicants have also discovered that native glucagon can be modified by introducing charge at its carboxy terminus to enhance the solubility of the peptide while retaining the agonist properties of the peptide. The enhanced solubility allows for the preparation and storage of glucagon solutions at near neutral pH. Formulating glucagon solutions at relatively neutral pHs (e.g. pH of about 6.0 to about 8.0) improves the long term stability of the Class 4 peptides.

[0931] Again, applicants anticipate that the Class 4 peptides disclosed herein can be similarly modified to enhance their solubility in aqueous solutions at relatively neutral pH (e.g. pH of about 6.0 to about 8.0) while retaining the antagonist properties of the parent protein. Accordingly, some embodiments of the present invention is directed to a Class 4 peptide of SEQ ID NO: 1339 that has been further modified relative to the native amino acids present at positions 6-29 of the wild type glucagon (SEQ ID NO: 1301) to add charge to the peptide by the substitution of native non-charged amino acids with charged amino acids, or the addition of charged amino acids to the carboxy terminus In accordance with some embodiments, one to three of the non-charged native amino acids of the Class 4 peptide of SEQ ID NO: 1339 are replaced with a charged amino acid. In some embodiments the charged amino acid is selected from the group consisting of lysine, arginine, histidine, aspartic acid and glutamic acid. More particularly, applicants have discovered that substituting the normally occurring amino acid at corresponding position 28 and/or 29 relative to native glucagon with charged amino acids, and/or the addition of one to two charged amino acids at the carboxy terminus of the Class 4 peptide, enhances the solubility and stability of the Class 4 peptides in aqueous solutions at physiologically relevant pHs (i.e., a pH of about 6.5 to about 7.5). Accordingly, such modifications of the Class 4 peptide disclosed herein are anticipated to have a similar effect on the solubility in aqueous solutions, particularly at a pH ranging from about 5.5 to about 8.0, while retaining the parent peptide's biological activity.

[0932] In accordance with some embodiments the Class 4 peptide of SEQ ID NO: 1339 is modified by the substitution of the native amino acid at corresponding position 28 and/or 29 relative to native glucagon with a negatively charged amino acid (e.g., aspartic acid or glutamic acid) and optionally the addition of a negatively charged amino acid (e.g., aspartic acid or glutamic acid) to the carboxy terminus of the peptide. In an alternative embodiment the Class 4 peptide of SEQ ID NO: 1339 is modified by the substitution of the native amino acid at corresponding position 29 relative to native glucagon with a positively charged amino acid (e.g., lysine, arginine or histidine) and optionally the addition of one or two positively charged amino acid (e.g., lysine, arginine or histidine) on the carboxy terminus of the peptide. In accordance with some embodiments a Class 4 peptide having improved solubility and stability is provided wherein the peptide comprises the amino acid sequence of SEQ ID NO: 1341 with the proviso that at least one amino acids at position, 23, or 24 of SEQ ID NO: 1341 is substituted with an acidic amino acid, and/or an additional acidic amino acid is added at the carboxy terminus of SEQ ID NO: 1341. In some embodiments the acidic amino acids are independently selected from the group consisting of Asp, Glu, cysteic acid and homocysteic acid.

[0933] In accordance with some embodiments a Class 4 peptide having improved solubility and stability is provided wherein the antagonist comprises the amino acid sequence of SEQ ID NO: 1341, SEQ ID NO: 1342, SEQ ID NO: 1343 or SEQ ID NO: 1344, wherein at least one of the amino acids at positions 23 or 24 is substituted with a non-native amino acid residue (i.e. at least one amino acid present at position 23 or 24 of the analog is an acidic amino acid different from the amino acid present at the corresponding position in SEQ ID NO: 1307). In accordance with some embodiments a glucagon agonist is provided comprising the sequence of SEQ ID NO: 1341 or 1342 with the proviso that when the amino acid at position 23 is asparagine and the amino acid at position 24 is threonine, the peptide further comprises one to two amino acids, independently selected from the group consisting of Lys, Arg, H is, Asp or Glu, added to the carboxy terminus of the Class 4 peptide.

[0934] In another embodiment the solubility of the Class 4 peptide of SEQ ID NO: 1342 can be improved by covalently linking a hydrophilic moiety to an amino acid residue at position 11, 12, 15, 16, 19 or 24, and in some embodiments the hydrophilic moiety is linked to an amino acid at position 11, 16 or 19, and in a further embodiment the hydrophilic moiety is linked to amino acid 19. In some embodiments the hydrophilic moiety is a plasma protein or the Fc portion of an immunoglobin, and in an alternative embodiment the hydrophilic moiety is a hydrophilic hydrocarbon chain. In some embodiments the hydrophilic moiety is polyethylene glycol, having a molecular weight selected from the range of about 1,000 to about 5,000 Daltons. In another embodiment the hydrophilic moiety is polyethylene glycol, having a molecular weight of at least about 20,000 Daltons. In some embodiments the polyethylene modified Class 4 peptide comprises the amino acids sequence of SEQ ID NO: 1309, SEQ ID NO: 1310, SEQ ID NO: 1311, SEQ ID NO: 1312, SEQ ID NO: 1343, SEQ ID NO: 1344 or SEQ ID NO: 1345.

### Modifications to Improve Stability

[0935] The Asp-Ser sequence at position 15-16 of native glucagon has been identified as a uniquely unstable dipeptide that leads to premature chemical cleavage of the native hormone in aqueous buffers. For example, when maintained at 0.01N HCl at 37° C. for 2 weeks, more than 50% of the native glucagon may be cleaved into fragments. The two liberated cleavage peptides 1-15 and 16-29 are devoid of glucagon-like biological activity and thus represent a limitation on the aqueous pre-formulation of glucagon and its related analogs. The selective chemical substitution of the Asp at position 15 of the native glucagon peptide with Glu has been observed to virtually eliminate chemical cleavage of the 15-16 peptide bond.

[0936] Accordingly, it is expected that the Class 4 peptides of the present invention can be similarly modified to decrease their susceptibility to premature chemical cleavage in aqueous buffers. In accordance with some embodiments the Class 4 peptides described herein can be further modified to enhance their stability in aqueous solutions by replacing the native aspartic amino acid, located at position 15 of the native glucagon peptide, with an amino acid selected from the group consisting of cysteic acid, glutamic acid, homoglutamic acid and homocysteic acid. In accordance with some embodiments the aspartic acid residue at position 10 of the Class 4 peptide of SEQ ID NO: 1339 can be substituted with an amino acid selected from the group consisting of cysteic acid, glutamic acid, homoglutamic acid and homocysteic acid, and in some embodiments the native aspartic acid at position 10 of SEQ ID NO: 1339 is replaced with glutamic acid. In accordance with some embodiments a Class 4 peptide having improved stability in aqueous solutions is provided wherein the antagonist comprises a sequence selected from the group consisting of SEQ ID NO: 1336, SEQ ID NO: 1340 and SEQ ID NO: 1342. In a further embodiment the Class 4 peptide is amidated.

[0937] In accordance with some embodiments, increased stability by way of reduced degradation of the Class 4 peptide described herein may also be achieved by substitution of the serine at position 16 (according to the numbering of native glucagon) with glutamic acid, cysteic acid, homo-glutamic acid, or homo-cysteic acid. In a specific embodiment, the serine at position 16 (according to the native glucagon sequence numbering) is replaced with glutamic acid. In a more specific aspect, the Class 4 peptide comprising such a modification comprises a C-terminal carboxylate and is not amidated.

[0938] In accordance with some embodiments, a Class 4 peptide is provided comprising a glucagon peptide selected from the group consisting of SEQ ID NO: 1307, SEQ ID NO: 1336, SEQ ID NO: 1339, SEQ ID NO: 1340, SEQ ID NO: 1341, SEQ ID NO: 1342, SEQ ID NO: 1343 and SEQ ID NO: 1344, further modified by one or more additional amino acid substitutions at positions corresponding to positions 11, 12, 15, 16, 19 and/or 24 of the native glucagon peptide, wherein the amino acid substitutions comprise a substitution with an amino acid having a side chain suitable for crosslinking with hydrophilic moieties, including for example, PEG. The peptide can be substituted with a naturally occurring amino acid or a synthetic (non-naturally occurring) amino acid. Synthetic or non-naturally occurring amino acids refer to amino acids that do not naturally occur in vivo but which, nevertheless, can be incorporated into the peptide structures described herein. In some embodiments a Class 4 peptide is provided wherein the peptide comprises the sequence of SEQ ID NO: 1307, SEQ ID NO: 1336, SEQ ID NO: 1339, SEQ ID NO: 1340, SEQ ID NO: 1341, SEQ ID NO: 1342, SEQ ID NO: 1343 and SEQ ID NO: 1344, and further comprises a polyethylene glycol chain bound to corresponding position 21 or 24 of the native glucagon peptide. In a further embodiment the C-terminus of the Class 4 peptide is modified to replace the carboxylic acid group with an amide group.

### Fusion Peptides and Conjugates

[0939] The present disclosure also encompasses Class 4 peptide fusion peptides wherein a second peptide has been fused to the C-terminus of the Class 4 peptide. More particularly, the fusion peptide may comprise a Class 4 peptide of SEQ ID NO: 1344 that further comprises an amino acid sequence of SEQ ID NO: 1319 (GPSSGAPPPS), SEQ ID NO: 1320 (Lys Arg Asn Arg Asn Asn Ile Ala) or SEQ ID NO: 1321 (Lys Arg Asn Arg) linked to the c-terminal amino acid of the Class 4 peptide. In some embodiments the amino acid sequence of SEQ ID NO: 1319 (GPSSGAPPPS) is bound to amino acid 24 of the Class 4 peptide of SEQ ID NO: 1342 through a peptide bond. In another embodiment the fusion peptide comprises a Class 4 peptide of SEQ ID NO: 1307, SEQ ID NO: 1336, SEQ ID NO: 1339, SEQ ID NO: 1340, SEQ ID NO: 1341 or SEQ ID NO: 1343 that further comprises an amino acid sequence of SEQ ID NO: 1319 (GPSSGAPPPS) linked to amino acid 24 of the Class 4 peptide. In another embodiment the fusion peptide comprises a Class 4 peptide of SEQ ID NO: 1307, SEQ ID NO: 1336, SEQ ID NO: 1337, SEQ ID NO: 1338, SEQ ID NO: 1339, SEQ ID NO: 1341 or SEQ ID NO: 1343 that further comprises an amino acid sequence of SEQ ID NO: 1320, SEQ ID NO: 1321 or SEQ ID NO: 1353 linked to amino acid 24 of the Class 4 peptide. In some embodiments the Class 4 peptide fusion peptide comprises a sequence selected from the group consisting of SEQ ID NO: 1346 and SEQ ID NO 1347. In a further embodiment the C-terminus of the fusion peptide is modified to replace the carboxylic acid group with an amide group.

[0940] In some embodiments a Class 4 peptide fusion peptide is provided wherein the Class 4 peptide portion of the fusion peptide is selected from the group consisting of SEQ ID NO: 1303, SEQ ID NO: 1304, SEQ ID NO: 1305, SEQ ID NO: 1306, SEQ ID NO: 1307, SEQ ID NO: 1308, SEQ ID NO: 1309, SEQ ID NO: 1311, SEQ ID NO: 1312, SEQ ID NO: 1313, SEQ

[0941] ID NO: 1314, SEQ ID NO: 1315, SEQ ID NO: 1310, SEQ ID NO: 1316, SEQ ID NO: 1317, SEQ ID NO: 1318 and SEQ ID NO: 1339 and the sequence of SEQ ID NO: 1319 is fused to the carboxy terminus of the Class 4 peptide portion, and wherein the PEG chain, when present, is selected from the range of 500 to 40,000 Daltons. More particularly, in some embodiments the Class 4 peptide segment is selected from the group consisting of SEQ ID NO: 1313, SEQ ID NO: 1314, SEQ ID NO: 1315, SEQ ID NO: 1316, SEQ ID NO: 1346 and SEQ ID NO: 1347 wherein the PEG chain is selected from the range of about 500 to about 5,000 Daltons, and more particularly, in some embodiments the PEG chain is about 1,000 Daltons. In a further embodiment the C-terminus is modified to replace the carboxylic acid group with an amide group.

[0942] The Class 4 peptide may further comprise one to two charged amino acids added to the carboxy terminus. In some embodiments, wherein one to two charged amino acids are added to the carboxy terminus of SEQ ID NO: 1344, the amino acids are negatively charged amino acids, including for example glutamic acid and aspartic acid. In some embodiments, the Class 4 peptide comprises the sequence of SEQ ID NO: 1342 wherein at least one of corresponding positions 27 and 28 relative to the native glucagon peptide comprises an amino acid selected from the group consisting of aspartic acid and glutamic acid and wherein SEQ ID NO: 1342 is optionally modified to include an addition one to two negatively charged amino acids added to the carboxy terminus. In some embodiments the negatively charged amino acids are glutamic acid or aspartic acid.

[0943] The Class 4 peptides disclosed herein can be combined with other active agents, including for example, insulin, to treat diseases or conditions that are characterized by excessive glucagon activity. In some embodiments, Class 4 peptides that have been modified to be covalently bound to a PEG chain having a molecular weight of greater than 10,000 Daltons can be administered in conjunction with insulin to help to maintain stable blood glucose levels in diabetics. The Class 4 peptides of the present disclosure can be co-administered with insulin as a single composition, simultaneously administered as separate solutions, or alternatively, the insulin and the Class 4 peptide can be administered at different times relative to one another. In some embodiments the composition comprising insulin and the composition comprising the Class 4 peptide are administered within 12 hours of one another. The exact ratio of the Class 4 peptide relative to the administered insulin will be dependent in part on determining the glucagon levels of the patient, and can be determined through routine experimentation.

### Dimer Peptides

[0944] The present disclosure also encompasses multimers of the modified Class 4 peptides disclosed herein. Two or more of the modified Class 4 peptides can be linked together using standard linking agents and procedures known to those skilled in the art. For example, dimers can be formed between two modified Class 4 peptides through the use of bifunctional thiol crosslinkers and bi-functional amine crosslinkers, particularly for Class 4 peptides that have been substituted (at positions 11, 16 or 19, for example) with cysteine, lysine ornithine, homocysteine or acetyl phenylalanine residues (e.g. SEQ ID NO: 1309, SEQ ID NO: 1310, SEQ ID NO: 1311 and SEQ ID NO: 1312). The dimer can be a homodimer or alternatively can be a heterodimer. In some embodiments the dimer is formed between two Class 4 peptides independently selected from the group consisting of SEQ ID NO: 1308, SEQ ID NO: 1309, SEQ ID NO: 1310, SEQ ID NO: 1311, SEQ ID NO: 1312, SEQ ID NO: 1345, SEQ ID NO: 1346, or SEQ ID NO: 1347, wherein the two peptides are linked to one another via a linker attached to position 11 of each peptide, 16 of each peptide, or position 19 of each peptide or any combination thereof. In some embodiments the linkage is a disulfide linkage between a Cys11 to Cys11 or a Cys19 to Cys 19 or a Cys11 to Cys 19 residue of the respective Class 4 peptide peptides.

[0945] Similarly, a dimer can be formed between two Class 4 peptide peptides independently selected form the group consisting of SEQ ID NO: 1303, SEQ ID NO: 1304, SEQ ID NO: 1305, SEQ ID NO: 1306, SEQ ID NO: 1307, SEQ ID NO: 1308, SEQ ID NO: 1309, SEQ ID NO: 1310, SEQ ID NO: 1311, SEQ ID NO: 1312, SEQ ID NO: 1336, SEQ ID NO: 1337, SEQ ID NO: 1338, SEQ ID NO: 1339 and SEQ ID NO: 1342 wherein the linkage is formed between amino acid positions independently selected from positions 16, 21 and 24 with respect to the native glucagon peptide.

[0946] In accordance with some embodiments a Class 4 peptide dimer is provided comprising two Class 4 peptides, each comprising the sequence of SEQ ID NO: 1346, wherein the two antagonists are linked to one another by a disulfide bond through amino acid position 25.

[0947] In another embodiment a Class 4 peptide dimer is provided comprising two Class 4 peptides, each comprising the sequence of SEQ ID NO: 1347, wherein the two antagonists are linked to one another by a disulfide bond through amino acid position 35. In some embodiments the dimer is formed from Class 4 peptides of SEQ ID NO: 1346 and SEQ ID NO: 1347 wherein the amino acid at position 10 is glutamic acid.

[0948] In some embodiments the dimer comprises a homodimer of a Class 4 peptide fusion peptide selected from the group consisting of SEQ ID NO: 1307, SEQ ID NO: 1308, SEQ ID NO: 1336, SEQ ID NO: 1337, SEQ ID NO: 1340, SEQ ID NO: 1339, NO: 1340, SEQ ID NO: 1341, SEQ ID NO: 1342 and pharmaceutically acceptable salts of said Class 4 peptides. In accordance with some embodiments a dimer is provided comprising a first Class 4 peptide bound to a second Class 4 peptide via a linker, wherein the first and second peptides of the dimer are independently selected from the group consisting of SEQ ID NO: 1307, SEQ ID NO: 1308, SEQ ID NO: 1336, SEQ ID NO: 1337, SEQ ID NO: 1339, SEQ ID NO: 1340, SEQ ID NO: 1341, and SEQ ID NO: 1342, and pharmaceutically acceptable salts of said glucagon polypeptides. In another embodiment the first and second Class 4 peptides of the dimer are independently selected from the group consisting of SEQ ID NO: 1307, SEQ ID NO: 1308, SEQ ID NO: 1336 and SEQ ID NO: 1339.

[0949] In another embodiment the dimer comprises a homodimer of a Class 4 peptide selected from the group consisting of SEQ ID NO: 1323, SEQ ID NO: 1324, SEQ ID NO: 1325, SEQ ID NO: 1326, SEQ ID NO: 1327, SEQ ID NO: 1328, SEQ ID NO: 1329, SEQ ID NO: 1330, SEQ ID NO: 1331. In another embodiment, a Class 4 peptide dimer is provided wherein the first and second peptides of the dimer comprise an amino acid sequence independently selected from the group consisting of SEQ ID NO: 1323, SEQ ID NO: 1324, SEQ ID NO: 1325, SEQ ID NO: 1326, SEQ ID NO: 1327 and SEQ ID NO: 1328. In another embodiment the dimer comprises a homodimer of a Class 4 peptide selected from the group consisting of SEQ ID NO: 1309, SEQ ID NO: 1311 and SEQ ID NO: 1312, wherein the peptide further comprises a polyethylene glycol chain covalently bound to position 11 or 19 of the glucagon peptide.

[0950] The Class 4 glucagon related peptide may comprise the amino acid sequence of any of SEQ ID NOs: 1301-1371, optionally with up to 1, 2, 3, 4, or 5 further modifications that retain glucagon antagonist activity.

### Class 5 Glucagon Related Peptides

[0951] In certain embodiments, a glucagon related peptide is a class 5 glucagon related peptide (see, e.g., International (PCT) Patent Application Publication No. WO 2009/058734, incorporated herein by reference in its entirety).

[0952] All biological sequences referenced in the following section (SEQ ID NOs: 1401-1518) correspond to SEQ ID NOs.: 1-118 in International Patent Application Publication No. WO 2009/058734.

### Activity

[0953] In certain aspects a class 5 glucagon related peptide (hereafter referred to as a “class 5 peptide”) may be a glucagon antagonist/GLP-1 agonist. Glucagon antagonists/GLP-1 agonists are utilized in any setting where the suppression of glucagon agonism is desired while simultaneous stimulation of GLP-1 activity is also desired. For example, glucagon antagonist activity in conjunction with GLP-1 stimulation can be used in the treatment of diabetes where glucagon antagonism has been demonstrated in pre-clinical models of hyperglycemia to yield a lowering of blood glucose and GLP-1 activity is associated with insulin production. Compounds demonstrating GLP-1 activity have also been known to be useful for treating obesity and preventing weight gain.

[0954] In certain aspects class 5 peptides are believed to be suitable for any use that has previously been described for other glucagon antagonist/GLP-1 agonists. These two activities have separately been shown to be highly desirable properties for the treatment of the metabolic syndrome, specifically diabetes and obesity. The glucagon antagonist activity is useful in any setting where the suppression of glucagon agonism is desired. The presence of GLP-1 agonism further suppresses the endogenous secretion of glucagon from the pancreas while stimulating insulin synthesis and secretion. The two pharmacological actions serve in a synergistic fashion to normalize metabolic abnormalities. Accordingly, the Class 5 peptides can be used to treat hyperglycemia, or treat other metabolic diseases that result from high blood levels of glucagon or high blood glucose levels. In accordance with some embodiments the patient to be treated using the glucagon antagonist/GLP-1 agonists such as class 5 peptides disclosed herein is a domesticated animal, and in another embodiment the patient to be treated is a human. Studies suggest that lack of glucagon suppression in diabetic patients contributes to postprandial hyperglycemia in part via accelerated glycogenolysis. Analysis of blood glucose during an Oral Glucose Tolerance Test (OGTT), and in the presence or absence of somatostatin-induced glucagon suppression has shown a significant increase in glucose in subjects with higher glucagon levels. Accordingly, a glucagon antagonist/GLP-1 agonists or Class 5 peptides described herein can be used to treating hyperglycemia, and are expected to be useful for treating a variety of types of diabetes including diabetes mellitus type I, diabetes mellitus type II, or gestational diabetes, either insulin-dependent or non-insulin-dependent, and reducing complications of diabetes including nephropathy, retinopathy and vascular disease.

[0955] Such methods for reducing appetite or promoting loss of body weight are expected to be useful in reducing body weight, preventing weight gain, or treating obesity of various causes, including drug-induced obesity, and reducing complications associated with obesity including vascular disease (coronary artery disease, stroke, peripheral vascular disease, ischemia reperfusion, etc.), hypertension, onset of diabetes type II, hyperlipidemia and musculoskeletal diseases.

[0956] Pharmaceutical compositions comprising class 5 peptides can be formulated and administered to patients using standard pharmaceutically acceptable carriers and routes of administration known to those skilled in the art. Accordingly, the present disclosure also encompasses pharmaceutical compositions comprising one or more class 5 peptides disclosed herein in combination with a pharmaceutically acceptable carrier. The pharmaceutical compositions may comprise the class 5 peptides as the sole pharmaceutically active component, or the class 5 peptides can be combined with one or more additional active agents. In accordance with some embodiments a composition is provided comprising a Class 5 peptide and insulin or an insulin analog. Alternatively, a composition is provided for inducing weight loss or preventing weight gain can be provided that comprises the sequence of SEQ ID NO: 1415 or SEQ ID NO: 1451 further comprising the amino acid sequence of SEQ ID NO: 1421 (GPSSGAPPPS) or SEQ ID NO: 1450 linked to amino acid 24 of SEQ ID NO: 1415 or SEQ ID NO: 1451, and an anti-obesity peptide. Suitable anti-obesity peptides include those disclosed in U.S. Pat. Nos. 5,691,309, 6,436,435 or US Patent application 20050176643.

### Class 5 Peptide Structure

[0957] In accordance with some embodiments a Class 5 peptide is provided comprising a glucagon peptide that has been modified by the deletion of the first 1 to 5 amino acids residues (e.g., first amino acid, first two amino acids, first three amino acids, first four amino acids, first five amino acids) from the N-terminus, and stabilization of the alpha-helix structure in the C-terminal portion of the compound (around amino acid positions 12-29 according to the amino acid numbering of wild type glucagon, SEQ ID NO: 1401), e.g., by the linkage of the side chains of amino acid pairs, selected from positions 12 and 16, 16 and 20, 20 and 24, and 24 and 28 (relative to the native glucagon peptide sequence), to one another through hydrogen-bonding or ionic interactions, such as the formation of salt bridges, or by covalent bonds. Alternatively, stabilization of the alpha-helix around residues 12-29 is achieved through introduction of one or more α,α-disubstituted amino acids at positions that retain the desired activity. In some embodiments, one, two, three, four or more of positions 16, 17, 18, 19, 20, 21, 24 or 29 (according to the amino acid numbering of wild type glucagon) of the Class 5 peptide or analog thereof is substituted with an α,α-disubstituted amino acid. For example, substitution of position 16 (according to the amino acid numbering of wild type glucagon) of a Class 5 peptide or analog thereof with amino iso-butyric acid (Aib) provides a stabilized alpha helix in the absence of a salt bridge or lactam. In some embodiments, one, two, three or more of positions 16, 20, 21 or 24 (according to the amino acid numbering of wild type glucagon) are substituted with Aib.

[0958] In accordance with some embodiments, a class 5 peptide is provided wherein the peptide exhibits at least 80% of the maximum agonism achieved by native GLP-1 at the GLP-1 receptor, and exhibits glucagon antagonist activity that reduces the maximum glucagon-induced cAMP production at the glucagon receptor by at least about 50%, as measured by cAMP production in an in vitro assay. In some embodiments, the class 5 peptide exhibits at least 90% of the activity of native GLP-1 at the GLP-1 receptor, and exhibits glucagon antagonist activity, that reduces the maximum glucagon-induced cAMP production at the glucagon receptor by at least about 80%.

[0959] In accordance with some embodiments the class 5 peptide comprises a derivative peptide of SEQ ID NO: 1402 wherein the peptide comprises further amino acid substitutions relative to SEQ ID NO: 1402 at one to three amino acid positions selected from positions 1, 2, 4, 5, 6, 7, 8, 9, 10, 11, 12, 13, 14, 15, 16, 19, 22 and 24, and exhibits at least 90% of the activity of native GLP-1 at the GLP-1 receptor, and exhibits glucagon antagonist activity, that reduces the maximum glucagon-induced cAMP production at the glucagon receptor by at least about 80%.

[0960] In some embodiments, the alpha-helix structure in the C-terminal portion of the Class 5 peptide (around amino acids 12-29 according to the amino acid numbering of wild type glucagon) is stabilized by, e.g., formation of a covalent or non-covalent intramolecular bridge, or substitution and/or insertion of amino acids around positions 12-29 with an alpha helix-stabilizing amino acid (e.g., an α,α-disubstituted amino acid). In some embodiments, one, two, three, four or more of positions 16, 17, 18, 19, 20, 21, 24 or 29 (according to the amino acid numbering of wild type glucagon) of the Class 5 peptide or analog thereof is substituted with an α,α-disubstituted amino acid e.g., amino isobutyric acid (Aib). For example, substitution of position 16 (according to the amino acid numbering of wild type glucagon) of a Class 5 peptide or analog thereof with amino iso-butyric acid (Aib) provides a stabilized alpha helix in the absence of a salt bridge or lactam.

[0961] In some embodiments the class 5 peptide comprises SEQ ID NO: 1415 or SEQ ID NO: 1451, and more particularly, a sequence selected from the group consisting of SEQ ID NO: 1405, SEQ ID NO: 1406, SEQ ID NO: 1407, SEQ ID NO: 1408, SEQ ID NO: 1409, SEQ ID NO: 1416, SEQ ID NO: 1417, SEQ ID NO: 1418, SEQ ID NO: 1419, SEQ ID NO: 1422, SEQ ID NO: 1423, SEQ ID NO: 1424 and SEQ ID NO: 1425. In further embodiments the class 5 peptide comprises a derivative peptide of SEQ ID NO: 1415 or SEQ ID NO: 1451 wherein the peptide comprises a further amino acid substitution relative to SEQ ID NO: 1415 or SEQ ID NO: 1451 at one to three amino acid positions selected from positions 1, 2, 5, 6, 8, 9, 12, 13 and 14. In some embodiments the substitutions at positions 1, 2, 5, 6, 8, 9, 12, 13 and 14 are conservative amino acid substitutions. In some embodiments the threonine at position 24 of SEQ ID NO: 1405 or SEQ ID NO: 1406 is substituted with glycine.

[0962] In accordance with some embodiments the class 5 peptide represents a further modification of the peptide wherein in addition to the N-terminal deletion, the phenylalanine at position 6 of the native glucagon peptide is modified, e.g., to comprise a hydroxyl group in place of the N-terminus amino group. In a further embodiment the natural carboxylic acid of the C-terminal amino acid is replaced with a charge-neutral group, such as an amide or ester.

[0963] In accordance with some embodiments, Class 5 peptides have been prepared wherein the first three to five amino acids of native glucagon have been deleted, the amino acid at position 9, relative to the native glucagon peptide, has been substituted with an amino acid selected from the group consisting of glutamic acid, homoglutamic acid, β-homoglutamic acid, a sulfonic acid derivative of cysteine, or an alkylcarboxylate derivative of cysteine having the structure of:

[chemical structure]

wherein X₅ is C1-C4 alkyl, C2-C4 alkenyl, or C2-C4 alkynyl, and the alpha-helix structure in the C-terminal portion of glucagon (around amino acids 12-29 according to the amino acid numbering of wild type glucagon) is stabilized, e.g., via a lactam bridge is formed between the side chains of amino acids 12 and 16 or between amino acids 16 and 20, relative to the native glucagon peptide. Examples of amino acid pairings that are capable of covalently bonding to form a seven-atom linking bridge are detailed through-out this disclosure. In some embodiments, the sulfonic acid derivative of cysteine is cysteic acid or homocysteic acid.

[0964] In some embodiments a class 5 is provided comprising an amino acid sequence selected from the group consisting of SEQ ID NO: 1405, SEQ ID NO: 1406, SEQ ID NO: 1407, or SEQ ID NO: 1408, wherein said peptide comprises a lactam ring formed between the side chains of amino acids 7 and 11 for SEQ ID NO: 1405, between 11 and 15 for SEQ ID NO: 1406, between positions 15 and 19 for SEQ ID NO: 1407 and between positions 19 and 24 for SEQ ID NO: 1408, each of said sequences being further modified to comprise a hydrophilic moiety covalently bound to the peptide. More particularly, in some embodiments each of the lactam bearing class 5 peptide are modified by covalent attachment of a polyethylene glycol chain. For example, for a class 5 peptide comprising SEQ ID NO: 1405, the peptide is pegylated at a position selected from the group consisting of 12, 15, 16, 19 and 24; for a class 5 peptide comprising SEQ ID NO: 1406, the peptide is pegylated at a position selected from the group consisting of 12, 16, 19 and 24; for a class 5 peptide comprising SEQ ID NO: 1407, the peptide is pegylated at a position selected from the group consisting of 11, 12, 16 and 24; for class 5 peptide comprising SEQ ID NO: 1408, the peptide is pegylated at a position selected from the group consisting of 11, 12, 15 and 16. In accordance with some embodiments a class 5 peptide comprising SEQ ID NO: 1447 or SEQ ID NO: 1448 is provided wherein the petide is pegylated at a position selected from the group consisting of 12, 16, 19 and 24, relative to the SEQ ID NO: 1447 or SEQ ID NO: 1448 sequence. In a further embodiment the peptide of SEQ ID NO: 1447 or SEQ ID NO: 1448 is further modified by the addition of the sequence of SEQ ID NO: 1421 to the carboxy terminus of the peptide.

[0965] As detailed above in certain aspects Class 5 peptides are provided wherein the first five amino acids of native glucagon have been deleted, the amino group of the N-terminal amino acid (phenylalanine) has been replaced with a hydroxyl group (i.e., the first amino acid is phenyl-lactic acid) and the side chains of one or more amino acid pairs selected from positions 12 and 16, 16 and 20, 20 and 24, and 24 and 28 are linked to one another, thus stabilizing the Class 5 peptide alpha helix.

[0966] In accordance with some embodiments a class 5 peptide is provided comprising the sequence of SEQ ID NO: 1402 that is modified by a substitution of the serine residue at position 11 of SEQ ID NO: 1402 (position 16 according to the amino acid numbering of native glucagon) with an amino acid selected from the group consisting of glutamic acid, glutamine, homoglutamic acid, homocysteic acid, threonine or glycine. In accordance with some embodiments the serine residue at position 11 of SEQ ID NO: 1402 is substituted with an amino acid selected from the group consisting of glutamic acid, glutamine, homoglutamic acid and homocysteic acid, and in some embodiments the serine residue is substituted with glutamic acid. In accordance with some embodiments the class 5 peptide comprises the sequence of SEQ ID NO: 1438.

[0967] In some embodiments a class 5 peptide is provided wherein an intramolecular bridge is formed between two amino acid side chains to stabilize the three dimensional structure of the carboxy terminus of the peptide of SEQ ID NO: 1402. More particularly, the side chains of one or more amino acids selected from amino acid pairs 7 and 11, 11 and 15, 15 and 19 or 19 and 23 of SEQ ID NO: 1402 are linked to one another, thus stabilizing the alpha helix in the C-terminal portion. The two side chains can be linked to one another through hydrogen-bonding, ionic interactions (such as the formation of salt bridges), or by covalent bonds. In accordance with some embodiments the size of the linker is 7-9 atoms, and in some embodiments the size of the linker is 8 atoms. In some embodiments the class 5 peptide is selected from the group consisting of SEQ ID NO: 1405, SEQ ID NO: 1406, SEQ ID NO: 1407 and SEQ ID NO: 1408. In some embodiments the C-terminal amino acid of the class 5 peptide have an amide group substituting for the carboxylic acid group that is present on the native amino acid.

[0968] In accordance with some embodiments class 5 peptide is provided wherein the analog comprises an amino acid sequence of SEQ ID NO: 1409. In some embodiments the three dimensional structure of the carboxy terminus of the peptide of SEQ ID NO: 1409 is stabilized by the formation of covalent bonds between the side chains of the peptide. In some embodiments two amino acid side chains are bound to one another to form a lactam ring. The size of the lactam ring can vary depending on the length of the amino acid side chains, and in some embodiments the lactam is formed by linking the side chains of a lysine amino acid to a glutamic acid side chain. In some embodiments the C-terminal amino acid of the class 5 peptides have an amide group substituting for the carboxylic acid group that is present on the native amino acid.

[0969] The order of the amide bond in the lactam ring can be reversed (e.g., a lactam ring can be formed between the side chains of a Lys 12 and a Glu 16 or alternatively between a Glu 12 and a Lys16). In accordance with some embodiments a glucagon analog of SEQ ID NO: 1409 is provided wherein at least one lactam ring is formed between the side chains of an amino acid pair selected from the group consisting of amino acid pairs 7 and 11, 11 and 15, 15 and 19 or 19 and 23 of SEQ ID NO: 1409. In some embodiments a class 5 peptide is provided wherein the peptide comprises the sequence of SEQ ID NO: 1410, said sequence further comprising an intramolecular lactam bridge formed between amino acid positions 7 and 11, or between amino acid positions 11 and 15, or between amino acid positions 15 and 19 of SEQ ID NO: 1410. In some embodiments a class 5 peptide is provided wherein the peptide comprises the sequence of SEQ ID NO: 1411, said sequence further comprising an intramolecular lactam bridge formed between amino acid positions 7 and 11, or between amino acid positions 11 and 15 of SEQ ID NO: 1411. In some embodiments the class 5 peptide comprises the sequence of SEQ ID NO: 1417.

[0970] Additional class 5 peptide are provided comprising derivatives of SEQ ID NO: 1405, wherein the aspartic acid at position 10 of SEQ ID NO: 1405 (position 15 of native glucagon) has been substituted with glutamic acid, an amino acid of the general structure:

[chemical structure]

wherein X₆ is C1-C3 alkyl, C2-C3 alkene or C2-C3 alkynyl, and in some embodiments X₆ is C1-C3 alkyl, and in another embodiment X₆ is C2 alkyl. In some embodiments a Class 5 peptide derivative of SEQ ID NO: 1409 is provided wherein position 10 of SEQ ID NO: 1409 (position 15 of native glucagon) is substituted with an amino acid selected from the group consisting of glutamic acid, cysteic acid, homocysteic acid and homoglutamic acid. In a further embodiment position 10 of SEQ ID NO: 1409 is substituted with an amino acid selected from the group consisting of cysteic acid or homocysteic acid. In some embodiments a Class 5 peptide derivative of SEQ ID NO: 1406, SEQ ID NO: 1407 or SEQ ID NO: 1408 is provided wherein position 10 of SEQ ID NO: 1406, SEQ ID NO: 1407 or SEQ ID NO: 1408 is substituted with an amino acid selected from the group consisting of glutamic acid, cysteic acid, homocysteic acid and homoglutamic acid. In some embodiments the C-terminal amino acid of a class 5 peptide have an amide group substituting for the carboxylic acid group that is present on the native amino acid.

[0971] In some embodiments an amino acid of class 5 peptide is substituted with at least one cysteine residue, wherein the side chain of the cysteine residue is further modified with a thiol reactive reagent, including for example, maleimido, vinyl sulfone, 2-pyridylthio, haloalkyl, and haloacyl. These thiol reactive reagents may contain carboxy, keto, hydroxyl, and ether groups as well as other hydrophilic moieties such as polyethylene glycol units. In an alternative embodiment, an amino acid of a class 5 peptide is substituted with lysine, and the side chain of the substituting lysine residue is further modified using amine reactive reagents such as active esters (succinimido, anhydride, etc) of carboxylic acids or aldehydes of hydrophilic moieties such as polyethylene glycol. In accordance with some embodiments the lysine residue corresponding to position 7 of the peptide of SEQ ID NO: 1405 is substituted with arginine and a single lysine substitution is inserted for one of the amino acids corresponding to position 12, 15, 16, 19 and 24 of SEQ ID NO: 1405.

[0972] In another embodiment the methionine residue corresponding to position 22 of the class 5 peptides disclosed herein is changed to leucine or norleucine to prevent oxidative degradation of the peptide.

[0973] Moreover class 5 peptides, in some aspects, also encompass amino acid substitutions at positions that are known not to be critical to the function of the glucagon analog. In some embodiments the substitutions are conservative amino acid substitutions at one, two or three positions selected from the group consisting of 2, 5, 6, 7, 8, 9, 12, 13, 14, 15, 16, 19, 22, 23 or 24. In some embodiments the amino acids corresponding to positions 16, 17, 20, 21, 24 or 29 of the native glucagon peptide, and more particularly at position 21 and/or 24 relative to native glucagon are substituted with cysteine or lysine, wherein a PEG chain is covalently attached to the substituted cysteine or lysine residue.

[0974] In accordance with some embodiments, a class 5 peptide is provided comprising a sequence consisting of SEQ ID NO: 1409, further modified by one or more additional amino acid substitutions at positions corresponding to positions 11, 12, 15, 16, 19 and/or 24 of the peptide (including for example substitution with cysteine), wherein the amino acid substitution comprises an amino acid having a side chain suitable for crosslinking with hydrophilic moieties, including for example, PEG. Native glucagon can be substituted with a naturally occurring amino acid or a synthetic (non-naturally occurring) amino acid. Synthetic or non-naturally occurring amino acids refer to amino acids that do not naturally occur in vivo but which, nevertheless, can be incorporated into the peptide structures described herein. In some embodiments a Class 5 peptide is provided wherein the peptide comprises the sequence of SEQ ID NO: 1409 and further comprises a polyethylene glycol chain bound to position 16 or 19 of the peptide. In a further embodiment the C-terminus of the glucagon analog is modified to replace the carboxylic acid group with an amide group.

[0975] In accordance with some embodiments a class 5 peptide is provided comprising a glucagon analog selected from the group consisting of:

(SEQ ID NO: 1439)
R₁-Phe-Thr-Ser-Xaa-Tyr-Ser-Lys-Tyr-Leu-Xaa-Glu-Arg-Arg-Ala-Gln-Asp-Phe-Val-
Gln-Trp-Leu-Xaa-Asn-Thr-R₂
(SEQ ID NO: 1413)
R₁-Phe-Thr-Ser-Xaa-Tyr-Ser-Lys-Tyr-Leu-Asp-Glu-Arg-Arg-Ala-Gln-Xaa-Phe-Val-
Gln-Trp-Leu-Xaa-Asn-Thr-R₂,
(SEQ ID NO: 1414)
R₁-Phe-Thr-Ser-Xaa-Tyr-Ser-Lys-Tyr-Leu-Asp-Glu-Arg-Arg-Ala-Gln-Asp-Phe-Val-
Xaa-Trp-Leu-Xaa-Asn-Thr-R₂
and
(SEQ ID NO: 1412)
R₁-Phe-Thr-Ser-Xaa-Tyr-Ser-Lys-Tyr-Leu-Asp-Glu-Arg-Arg-Ala-Gln-Xaa-Phe-Val-
Xaa-Trp-Leu-Xaa-Asn-Thr-R₂,

wherein Xaa at position 4=aspartic acid, glutamic acid, cysteic acid or homocysteic acid, Xaa at position 10=Asp, Glu, cysteic acid, homoglutamic acid and homocysteic acid, Xaa at position 16 is Asp, Cys, Orn, homocysteine or acetyl phenylalanine and the Xaa at position 19 is Gln, Cys, Orn, homocysteine and acetyl phenylalanine, Xaa at position 22=Met, Leu or Nle, R₁ is OH or NH₂, and R₂ is Gly Pro Ser Ser Gly Ala Pro Pro Pro Ser (SEQ ID NO: 1421), Gly Pro Ser Ser Gly Ala Pro Pro Pro Ser Xaa (SEQ ID NO: 1450; wherein Xaa is Cys, Orn, homocystein or acetyl phenyalanine), COOH or CONH₂, wherein the peptide is optionally pegylated at position 16 of SEQ ID NO: 1413, position 19 of SEQ ID NO: 1414 and at positions 16 and 19 of SEQ ID NO: 1412. In some embodiments the Thr at position 24 of SEQ ID NOs: 1412-1414 and 1439 is substituted with Gly. In accordance with some embodiments the peptide comprises the sequence of SEQ ID NO: 13 or SEQ ID NO: 1414, wherein R₁ is OH. In accordance with some embodiments the peptide comprises the sequence of SEQ ID NO: 1413 or SEQ ID NO: 1414, wherein R₁ is OH and R₂ is CONH₂. In accordance with some embodiments the peptide comprises the sequence of SEQ ID NO: 1413 or SEQ ID NO: 1414, wherein R₁ is OH, R₂ is CONH₂ and the threonine at position 24 is substituted with glycine.

[0976] In some embodiments, a class 5 peptide is further modified to comprise one or more amino acids of native GLP-1 by substitution of the native glucagon residue(s) at corresponding amino acid positions. For example, the class 5 peptide may comprise one or more amino acid substitutions at any of positions 2, 3, 17, 18, 21, 23, and 24 (according to the amino acid numbering of native glucagon). In a specific embodiment, the class 5 peptide is modified by one or more of the following amino acid substitutions: Ser2 is replaced with Ala, Gln3 is replaced with Glu, Arg17 is replaced with Gln, Arg at position 18 is replaced with Ala, Asp at position 21 is replaced with Glu, Val at position 23 is replaced with Ile, and Gln at position 24 is replaced with Ala (amino acid positions are in accordance with the native glucagon sequence). In a specific embodiment, the class 5 peptide is modified by replacing Ser2 with Ala and Gln3 with Glu (according to the amino acid numbering of native glucagon). In another specific embodiment, the class 5 peptide is modified with all of the following amino acid substitutions: Arg17 is replaced with Gln, Arg at position 18 is replaced with Ala, Asp at position 21 is replaced with Glu, Val at position 23 is replaced with Ile, and Gln at position 24 is replaced with Ala (amino acid numbering according to native glucagon). In yet another specific embodiment, the class 5 peptide is modified to comprise just Glu at position 21 (according to the numbering of SEQ ID NO: 1401). Accordingly, the class 5 peptide can comprise the amino acid sequence of any of SEQ ID NOs: 1460-1470, 1473-1478, 1480-1488, 1490-1496, 1503, 1504, 1506, and 1514-1518.

[0977] Also provided herein is a class 5 peptide or conjugate thereof comprising (1) a stabilized alpha helix through means described herein (e.g., through an intramolecular bridge, or incorporation of one or more alpha, alpha-di-substituted amino acids, or an acidic amino acid at position 16 (according to the numbering of SEQ ID NO:1401), or a combination thereof; (2) a C-terminal amide or ester in place of a C-terminal carboxylate, and (3) a general structure of A-B-C,

wherein A is selected from the group consisting of

[0978] (i) phenyl lactic acid (PLA);

[0979] (ii) an oxy derivative of PLA; and

[0980] (iii) a peptide of 2 to 6 amino acids in which two consecutive amino acids of the peptide are linked via an ester or ether bond;

wherein B represents amino acids p to 26 of SEQ ID NO: 1401, wherein p is 3, 4, 5, 6, or 7, optionally comprising one or more amino acid modifications, as described herein, including, for example, any of the modifications described for Class 5 peptides. For instance the one or more modification may be selected from the group consisting of:

[0981] (iv) Asp at position 9 (according to the amino acid numbering of SEQ ID NO: 1401) is substituted with a Glu, a sulfonic acid derivative of Cys, homoglutamic acid, β-homoglutamic acid, or an alkylcarboxylate derivative of cysteine having the structure of:

[chemical structure]

wherein X₅ is C1-C4 alkyl, C2-C4 alkenyl, or C2-C4 alkynyl;

[0982] (v) substitution of one or two amino acids at positions 10, 20, and 24, (according to the amino acid numbering of SEQ ID NO: 1401) with an amino acid covalently attached to an acyl or alkyl group via an ester, ether, thioether, amide, or alkyl amine linkage;

[0983] (vi) substitution of one or two amino acids at positions 16, 17, 20, 21, and 24 (according to the amino acid numbering of SEQ ID NO: 1401) with an amino acid selected from the group consisting of: Cys, Lys, ornithine, homocysteine, and acetyl-phenylalanine (Ac-Phe), wherein the amino acid of the group is covalently attached to a hydrophilic moiety;

[0984] (vii) Asp at position 15 (according to the numbering of SEQ ID NO: 1401) is substituted with cysteic acid, glutamic acid, homoglutamic acid, and homocysteic acid;

[0985] (viii) Ser at position 16 (according to the numbering of SEQ ID NO: 1401) is substituted with cysteic acid, glutamic acid, homoglutamic acid, and homocysteic acid;

[0986] (ix) Arg at position 17 is replaced with Gln, Arg at position 18 is replaced with Ala, Asp at position 21 is replaced with Glu, Val at position 23 is replaced with Ile, and Gln at position 24 is replaced with Ala (according to amino acid numbering of SEQ ID NO: 1401);

[0987] (x) Ser at position 16 is replaced with Glu, Gln at position 20 is replaced with Glu, or Gln at position 24 is replaced with Glu (according to the amino acid numbering of SEQ ID NO: 1401);

wherein C (of the general structure of A-B-C) is selected from the group consisting of:

[0988] (vii) X;

[0989] (viii) X—Y;

[0990] (ix) X—Y—Z;

[0991] (x) X—Y—Z—R10;

wherein X is Met, Leu, or Nle; Y is Asn or a charged amino acid; Z is Thr, Gly, Cys, Lys, ornithine (Orn), homocysteine, acetyl phenylalanine (Ac-Phe), or a charged amino acid; wherein R10 is selected from a group consisting of SEQ ID NOs: 1421, 1426, 1427, and 1450.

[0992] In a specific aspect, the peptide comprises an oxy derivative of PLA. As used herein “oxy derivative of PLA” refers to a compound comprising a modified structure of PLA in which the hydroxyl group has been replaced with O—R₁₁, wherein R₁₁ is a chemical moiety. In this regard, the oxy derivative of PLA can be, for example, an ester of PLA or an ether of PLA.

[0993] Methods of making oxy derivatives of PLA are known in the art. For example, when the oxy derivative is an ester of PLA, the ester may be formed by upon reaction of the hydroxyl of PLA with a carbonyl bearing a nucleophile. The nucleophile can be any suitable nucleophile, including, but not limited to an amine or hydroxyl. Accordingly, the ester of PLA can comprise the structure of Formula IV:

[chemical structure]

wherein R₇ is an ester formed upon reaction of the hydroxyl of PLA with a carbonyl bearing a nucleophile.

[0994] The carbonyl bearing a nucleophile (which reacts with the hydroxyl of PLA to form an ester) can be, for example, a carboxylic acid, a carboxylic acid derivative, or an activated ester of a carboxylic acid. The carboxylic acid derivative can be, but is not limited to, an acyl chloride, an acid anhydride, an amide, an ester, or a nitrile. The activated ester of a carboxylic acid can be, for example, N-hydroxysuccinimide (NHS), tosylate (Tos), a carbodiimide, or a hexafluorophosphate. In some embodiments, the carbodiimide is 1,3-dicyclohexylcarbodiimide (DCC), 1,1′-carbonyldiimidazole (CDI), 1-ethyl-3-(3-dimethylaminopropyl)carbodiimide hydrochloride (EDC), or 1,3-diisopropylcarbodiimide (DICD). In some embodiments, the hexafluorophosphate is selected from a group consisting of hexafluorophosphate benzotriazol-1-yl-oxy-tris(dimethylamino)phosphonium hexafluorophosphate (BOP), benzotriazol-1-yl-oxytripyrrolidinophosphonium hexafluorophosphate (PyBOP), 2-(1H-7-azabenzotriazol-1-yl)-1,1,3,3-tetramethyl uronium hexafluorophosphate (HATU), and o-benzotriazole-N,N,N′,N′-tetramethyl-uronium-hexafluoro-phosphate (HBTU).

[0995] Methods of making ethers from reaction with a hydroxyl group (e.g., the hydroxyl of PLA) also are known in the art. For example, the hydroxyl group of PLA may be reacted with a halogenated alkyl or tosylated alkyl alcohol to form an ether bond.

[0996] In a specific embodiment, the chemical moiety bound to PLA via an oxygen-containing bond (e.g., via an ester or ether bond) is a polymer (e.g., a polyalkylene glycol), a carbohydrate, an amino acid, a peptide, or a lipid, e.g., a fatty acid or a steroid.

[0997] In a specific embodiment, the chemical moiety is an amino acid, which, optionally, is a part of a peptide, such that Formula IV is a depsipeptide. In this regard, PLA may be at a position other than the N-terminal amino acid residue of the peptide, such that the peptide comprises one or more (e.g., 1, 2, 3, 4, 5, 6, or more) amino acids N-terminal to the PLA residue. For example, the peptide can comprise PLA at position n, wherein n is 2, 3, 4, 5, or 6 of the peptide.

[0998] The amino acids N-terminal to the PLA residue may be synthetic or naturally-occurring. In a specific embodiment, the amino acids which are N-terminal PLA are naturally-occurring amino acids. In some embodiments, the amino acids which are N-terminal to PLA are the N-terminal amino acids of native glucagon. For example, the peptide can comprise at the N-terminus the amino acid sequence of any of SEQ ID NOs: 1452-1456, wherein PLA is linked to threonine via an ester bond:

| | |
|---|---|
| SEQ ID NO: 1452 | His-Ser-Gln-Gly-Thr-PLA |
| SEQ ID NO: 1453 | Ser-Gln-Gly-Thr-PLA |
| SEQ ID NO: 1454 | Gln-Gly-Thr-PLA |
| SEQ ID NO: 1455 | Gly-Thr-PLA |
| SEQ ID NO: 1456 | Thr-PLA |

[0999] In an alternative embodiment, one or more of the N-terminal amino acids may be substituted with an amino acid other than the amino acid of native glucagon. For example, when the peptide comprises PLA as the amino acid at position 5 or 6, the amino acid at position 1 and/or position 2 may be an amino acid which reduces susceptibility to cleavage by dipeptidyl peptidase IV. More particularly, in some embodiments, position 1 of the peptide is an amino acid selected from the group consisting of D-histidine, alpha, alpha-dimethyl imidazole acetic acid (DMIA), N-methyl histidine, alpha-methyl histidine, imidazole acetic acid, desaminohistidine, hydroxyl-histidine, acetyl-histidine and homo-histidine. More particularly, in some embodiments, position 2 of the antagonist/agonist peptide is an amino acid selected from the group consisting of D-serine, D-alanine, valine, glycine, N-methyl serine, N-methyl alanine, and aminoisobutyric acid (Aib). Also, for example, when the peptide comprises PLA as the amino acid at position 4, 5, or 6, the amino acid at position 3 of the peptide may be glutamic acid, as opposed to the native glutamine residue of native glucagon. In an exemplary embodiment of the invention, the peptide comprises at the N-terminus the amino acid sequence of any of SEQ ID NOs: 1457-1459.

[1000] With respect to the peptides comprising a compound of Formula IV, the polymer may be any polymer, provided that it can react with the hydroxyl group of PLA. The polymer may be one that naturally or normally comprises a carbonyl bearing a nucleophile. Alternatively, the polymer may be one which was derivatized to comprise the carbonyl bearing the carbonyl. The polymer may be a derivatized polymer of any of: polyamides, polycarbonates, polyalkylenes and derivatives thereof including, polyalkylene glycols, polyalkylene oxides, polyalkylene terepthalates, polymers of acrylic and methacrylic esters, including poly(methyl methacrylate), poly(ethyl methacrylate), poly(butylmethacrylate), poly(isobutyl methacrylate), poly(hexylmethacrylate), poly(isodecyl methacrylate), poly(lauryl methacrylate), poly(phenyl methacrylate), poly(methyl acrylate), poly(isopropyl acrylate), poly(isobutyl acrylate), and poly(octadecyl acrylate), polyvinyl polymers including polyvinyl alcohols, polyvinyl ethers, polyvinyl esters, polyvinyl halides, poly(vinyl acetate), and polyvinylpyrrolidone, polyglycolides, polysiloxanes, polyurethanes and co-polymers thereof, celluloses including alkyl cellulose, hydroxyalkyl celluloses, cellulose ethers, cellulose esters, nitro celluloses, methyl cellulose, ethyl cellulose, hydroxypropyl cellulose, hydroxy-propyl methyl cellulose, hydroxybutyl methyl cellulose, cellulose acetate, cellulose propionate, cellulose acetate butyrate, cellulose acetate phthalate, carboxylethyl cellulose, cellulose triacetate, and cellulose sulphate sodium salt, polypropylene, polyethylenes including poly(ethylene glycol), poly(ethylene oxide), and poly(ethylene terephthalate), and polystyrene.

[1001] The polymer can be a biodegradable polymer, including a synthetic biodegradable polymer (e.g., polymers of lactic acid and glycolic acid, polyanhydrides, poly(ortho)esters, polyurethanes, poly(butic acid), poly(valeric acid), and poly(lactide-cocaprolactone)), and a natural biodegradable polymer (e.g., alginate and other polysaccharides including dextran and cellulose, collagen, chemical derivatives thereof (substitutions, additions of chemical groups, for example, alkyl, alkylene, hydroxylations, oxidations, and other modifications routinely made by those skilled in the art), albumin and other hydrophilic proteins (e.g., zein and other prolamines and hydrophobic proteins)), as well as any copolymer or mixture thereof. In general, these materials degrade either by enzymatic hydrolysis or exposure to water in vivo, by surface or bulk erosion.

[1002] The polymer can be a bioadhesive polymer, such as a bioerodible hydrogel described by H. S. Sawhney, C. P. Pathak and J. A. Hubbell in Macromolecules, 1993, 26, 581-587, the teachings of which are incorporated herein, polyhyaluronic acids, casein, gelatin, glutin, polyanhydrides, polyacrylic acid, alginate, chitosan, poly(methyl methacrylates), poly(ethyl methacrylates), poly(butylmethacrylate), poly(isobutyl methacrylate), poly(hexylmethacrylate), poly(isodecyl methacrylate), poly(lauryl methacrylate), poly(phenyl methacrylate), poly(methyl acrylate), poly(isopropyl acrylate), poly(isobutyl acrylate), and poly(octadecyl acrylate).

[1003] In some embodiments, the polymer is a water-soluble polymer. Suitable water-soluble polymers are known in the art and include, for example, polyvinylpyrrolidone, hydroxypropyl cellulose (HPC; Klucel), hydroxypropyl methylcellulose (HPMC; Methocel), nitrocellulose, hydroxypropyl ethylcellulose, hydroxypropyl butylcellulose, hydroxypropyl pentylcellulose, methyl cellulose, ethylcellulose (Ethocel), hydroxyethyl cellulose, various alkyl celluloses and hydroxyalkyl celluloses, various cellulose ethers, cellulose acetate, carboxymethyl cellulose, sodium carboxymethyl cellulose, calcium carboxymethyl cellulose, vinyl acetate/crotonic acid copolymers, poly-hydroxyalkyl methacrylate, hydroxymethyl methacrylate, methacrylic acid copolymers, polymethacrylic acid, polymethylmethacrylate, maleic anhydride/methyl vinyl ether copolymers, poly vinyl alcohol, sodium and calcium polyacrylic acid, polyacrylic acid, acidic carboxy polymers, carboxypolymethylene, carboxyvinyl polymers, polyoxyethylene polyoxypropylene copolymer, polymethylvinylether co-maleic anhydride, carboxymethylamide, potassium methacrylate divinylbenzene co-polymer, polyoxyethyleneglycols, polyethylene oxide, and derivatives, salts, and combinations thereof.

[1004] In a specific embodiment, the polymer is a polyalkylene glycol, including, for example, polyethylene glycol (PEG).

[1005] The carbohydrate may be any carbohydrate provided that it comprises or is made to comprise a carbonyl with an alpha leaving group. The carbohydrate, for example, may be one which has been derivatized to comprise a carbonyl with an alpha leaving group. In this regard, the carbohydrate may be a derivatized form of a monosaccharide (e.g., glucose, galactose, fructose), a disaccharide (e.g., sucrose, lactose, maltose), an oligosaccharide (e.g., raffinose, stachyose), a polysaccharide (a starch, amylase, amylopectin, cellulose, chitin, callose, laminarin, xylan, mannan, fucoidan, galactomannan.

[1006] The lipid may be any lipid comprising a carbonyl with an alpha leaving group. The lipid, for example, may be one which is derivatized to comprise the carbonyl. In this regard, the lipid, may be a derivative of a fatty acid (e.g., a C4-C30 fatty acid, eicosanoid, prostaglandin, leukotriene, thromboxane, N-acyl ethanolamine), glycerolipid (e.g., mono-, di-, tri-substituted glycerols), glycerophospholipid (e.g., phosphatidylcholine, phosphatidylinositol, phosphatidylethanolamine, phosphatidylserine), sphingolipid (e.g., sphingosine, ceramide), sterol lipid (e.g., steroid, cholesterol), prenol lipid, saccharolipid, or a polyketide. In some embodiments, the lipid is an oil, wax, cholesterol, sterol, fat-soluble vitamin, monoglyceride, diglyceride, triglyceride, or a phospholipid.

[1007] In some embodiments, R₇ has a molecular weight of about 100 kDa or less, e.g., about 90 kDa or less, about 80 kDa or less, about 70 kDa or less, about 60 kDa or less, about 50 kDa or less, about 40 kDa or less. Accordingly, R7 can have a molecular weight of about 35 kDa or less, about 30 kDa or less, about 25 kDa or less, about 20 kDa or less, about 15 kDa or less, about 10 kDa or less, about 5 kDa or less, or about 1 kDa.

[1008] In an alternative embodiment, the peptide comprising the general structure of A-B-C comprises, as A, a peptide of 2 to 6 amino acids in which two consecutive amino acids of the peptide of A are linked via an ester or ether bond. The ester or ether bond may be, e.g., between amino acids 2 and 3, 3 and 4, 4 and 5, or 5 and 6. Optionally the peptide of A may be further modified by covalent linkage to another chemical moiety including linkage to a polymer (e.g. a hydrophilic polymer), alkylation, or acylation.

[1009] In a specific embodiment, the above-described class 5 peptide comprising PLA is modified to comprise an oxy derivative of PLA, such as, for instance, an ester of PLA or an ether of PLA. For example, the class 5 peptide can comprise the amino acid sequence of any of SEQ ID NOs: 1402, 1405-1420, 1422-1425, 1432-1436, 1438, 1439, 1445, 1446, and 1451, wherein the PLA is linked via an ester or ether bond to an amino acid, peptide, polymer, acyl group, or alkyl group. The amino acid, peptide, polymer, acyl group, or alkyl group may be any of those described herein. In the case that the PLA is linked via an ester bond to an amino acid or peptide, the class 5 peptide may be considered as a depsipeptide.

[1010] Also, in another specific embodiment, the above-described class 5 peptide which lacks PLA is modified to comprise at least one ester bond or ether bond between two consecutive amino acids which are N-terminal to the amino acid at position 7 (according to the numbering of native glucagon). In a specific embodiment, the class 5 peptide comprises at least one ester or ether bond between the two consecutive amino acids. In a more specific embodiment, the Class 5 peptide comprises the N-terminal 6 amino acids of SEQ ID NO: 1401 and two consecutive amino acids of the N-terminal 6 amino acids are linked via an ester or ether bond.

[1011] The peptide of A may comprise any amino acids, synthetic or naturally occurring, provided that at least two consecutive amino acids are linked via an ester or ether bond. In a specific embodiment, the peptide of A comprises amino acids of native glucagon. The amino acid at position 1 and/or position 2 may be an amino acid which reduces susceptibility to cleavage by dipeptidyl peptidase IV. For instance, the peptide of A can comprise at position 1 an amino acid selected from the group consisting of D-histidine, alpha, alpha-dimethyl imidazole acetic acid (DMIA), N-methyl histidine, alpha-methyl histidine, imidazole acetic acid, desaminohistidine, hydroxyl-histidine, acetyl-histidine and homo-histidine. More particularly, in some embodiments, position 2 of the peptide of A is an amino acid selected from the group consisting of D-serine, D-alanine, valine, glycine, N-methyl serine, N-methyl alanine, and aminoisobutyric acid (Aib). Also, for example, the amino acid at position 3 of the peptide of A may be glutamic acid, as opposed to the native glutamine residue of native glucagon. Accordingly, the peptide of general structure of A-B-C can comprise an amino acid sequence of:

| | |
|---|---|
| Xaa1-Xaa2-Xaa3-Thr-Gly-Phe; | (SEQ ID NO: 1507) |
| Xaa2-Xaa3-Thr-Gly-Phe; | (SEQ ID NO: 1508) |
| or | |
| Xaa3-Thr-Gly-Phe; | (SEQ ID NO: 1509) |

wherein Xaa1 is selected from a group consisting of: H is, D-histidine, alpha, alpha-dimethyl imidazole acetic acid (DMIA), N-methyl histidine, alpha-methyl histidine, imidazole acetic acid, desaminohistidine, hydroxyl-histidine, acetyl-histidine and homo-histidine; Xaa2 is selected from a group consisting of: Ser, D-serine, D-alanine, valine, glycine, N-methyl serine, N-methyl alanine, and aminoisobutyric acid (Aib); and Xaa3 is Gln or Glu.

[1012] In some embodiments, B is modified by up to three amino acid modifications. For example, B, which represents native amino acid sequence of SEQ ID NO: 1401 is modified by one or more conservative amino acid modifications.

[1013] In another embodiment, B comprises one or more amino acid modifications selected from the group consisting of (iv) to (x), as described herein. In a specific embodiment, B comprises one or both of the amino acid modifications (v) and (vi). In a further specific embodiment, B comprises one or a combination of amino acid modifications selected from the group consisting of (iv), (vii), (viii), (ix), and (x), in addition to (v) and (vi).

[1014] As described herein, the peptide comprising the general structure A-B-C may comprise one or more charged amino acids at the C-terminus, e.g., as Y and/or Z, as described herein. Alternatively or additionally, the peptide comprising the general structure A-B-C may further comprise one to two charged amino acids C-terminal to Z, when C comprises X—Y—Z. The charged amino acids can be, for example, one of Lys, Arg, H is, Asp, and Glu. In a specific embodiment, Y is Asp.

[1015] In some embodiments, the peptide comprising the general structure A-B-C comprises a hydrophilic moiety covalently bound to an amino acid residue at position 1, 16, 20, 21, or 24 (according to the amino acid numbering of SEQ ID NO: 1401), or at the N- or C-terminal residue of the peptide comprising the general structure A-B-C. In a specific embodiment, the hydrophilic moiety is attached to a Cys residue of the peptide comprising the general structure A-B-C. In this regard, the amino acid at position 16, 21, 24, or 29 of native glucagon (SEQ ID NO: 1401) may be substituted with a Cys residue. Alternatively, a Cys residue comprising a hydrophilic moiety may be added to the C-terminus of the peptide comprising the general structure A-B-C as position 30 or as position 40, e.g., when the peptide comprising the general structure A-B-C comprises a C-terminal extension (positions according to the amino acid numbering of SEQ ID NO: 1401). Alternatively, the hydrophilic moiety may be attached to the PLA of the peptide comprising the general structure A-B-C via the hydroxyl moiety of PLA. The hydrophilic moiety can be any of those described herein, including, for example, polyethylene glycol.

[1016] In a specific aspect, the peptide comprising the general structure A-B-C comprises a stabilized alpha helix by virtue of incorporation of an intramolecular bridge. In some embodiments, the intramolecular bridge is a lactam bridge. The lactam bridge may be between the amino acids at positions 9 and 12, the amino acids at positions 12 and 16, the amino acids at positions 16 and 20, the amino acids at positions 20 and 24, or the amino acids at positions 24 and 28 (according to the amino acid numbering of SEQ ID NO: 1401). In a specific embodiment, the amino acids at positions 12 and 16 or at positions 16 and 20 (according to the amino acid numbering of SEQ ID NO: 1401) are linked via a lactam bridge. Other positions of the lactam bridge are contemplated.

[1017] Additionally or alternatively, the peptide comprising the general structure A-B-C can comprise an alpha, alpha di-substituted amino acid at, for example, any of positions 16, 20, 21, or 24 (according to the amino acid numbering of SEQ ID NO: 1401). In some embodiments, the alpha, alpha di-substituted amino acid is Aib. In a specific aspect, the Aib is located at position 16 (according to the numbering of SEQ ID NO: 1401).

[1018] Alternatively or additionally, the peptide comprising the general structure A-B-C may be modified to comprise an acidic amino acid at position 16 (according to the numbering of SEQ ID NO: 1401), which modification enhances the stability of the alpha helix. The acidic amino acid, in some embodiments, is an amino acid comprising a side chain sulfonic acid or a side chain carboxylic acid. In a more specific embodiment, the acidic amino acid is selected from the group consisting of Glu, Asp, homoglutamic acid, a sulfonic acid derivative of Cys, cysteic acid, homocysteic acid, Asp, and an alkylated derivative of Cys having the structure of

[chemical structure]

wherein X₅ is C1-C4 alkyl, C2-C4 alkenyl, or C2-C4 alkynyl.

[1019] In a specific embodiment, the Class 5 peptide may comprise the amino acid sequence of any of SEQ ID NOs: 1460-1470, 1473-1478, 1480-1488, 1490-1496, 1503, 1504, 1506, and 1514-1518, or comprising the amino acid sequence of any of Peptides 2-6 of Table 13, Peptides 1-8 of Table 14, and Peptides 2-6, 8, and 9 of Table 15.

TABLE 13
Lactam, Cex glucagon(6-39) peptides and glucagon antagonist and
GLP-1 agonist activity

| | | | GLP-1 | Glu |
|---|---|---|---|---|
| | | | ECₛₒ | ICₛₒ |
| | | | (nM) | (nM) |
| 1 | E9, K12, E16 | FTSEYSKYLDERRAQDFVQWLMNTGPSSGAPPPS | 1451 | 762 |
| 2 | E9, K12E16(lactam) | FTSEYSKYLDERRAQDFVQWLMNTGPSSGAPPPS | 63 | 2008 |
| 3 | E9, E16K20(lactam) | FTSEYSKYLDERRAKDFVQWLMNTGPSSGAPPPS | 36 | 42 |
| 4 | D9, K12E16(Lactam) | FTSDYSKYLDERRAQDFVQWLMNTGPSSGAPPPS | 118.7 | 828 |
| 5 | [PLA6, E9, | PLA-TSEYSKYLDERRAQDFVQWLMNTGPSSGAPPPS | 6 | 72 |
| | K12E16(Lactam) | | | |
| 6 | [PLA6, E9, | PLA-TSEYSKYLDERRAKDFVQWLMNTGPSSGAPPPS | 20 | 20 |
| | E16K20(Lactam)] | | | |

TABLE 14
Lactam glucagon(1-29, 2-29, 4-29 and 6-29) peptides and their
glucagon antagonist and GLP-1 agonist activity
(PA = partial antagonist)

| | | GLP-1 | Glucagon |
|---|---|---|---|
| | | EC50 | IC50 |
| | | (nM) | (nM) |
| | Glucagon | | 0.2~1.0* |
| | HSQGTFTSDYSKYLDSRRAQDFVQWLMNT | | |
| | GLP-1 (aa 1-30) | 0.02~0.1 | |
| | HAEGTFTSDVSSYLEGQAAKEFIAWIVKGR | | |
| 1 | [PLA6, D9, E16K20(lactam), D28]G(6-29) | 5~25 | 10~30 |
| | PLA TSDYSKYLDERRAKDFVQWLMDT | | |
| 2 | [PLA6, D9, K12E16(Lactam), D28]G(6-29) | 177 | 63 |
| | PLA TSDYSKYLDERRAQDFVQWLMDT | | |
| 3 | [PLA6, D9, E16, K20E24(Lactam), D28]G(6-29) | 239 | 74 |
| | PLA TSDYSKYLDERRAKDFVEWLMDT | | |
| 4 | [PLA6, D9, E16, E24K28(lactam)]G(6~29) | 289 | 22 |
| | PLA TSDYSKYLDERRAQDFVEWLMKT | | |
| 5 | [E9, E16K20(lactam), D28]G(4~29) | 151 | 10~30 |
| | GTFTSEYSKYLDERRAKDFVQWLMDT | | |
| 6 | [E9, E16K20(lactam), D28]G(2~29) | 203 | 49 (PA) |
| | SQGTFTSEYSKYLDERRAKDFVQWLMDT | | |
| 7 | [A2E3, E16K20(Lactam),D28]G(2~29) | 175 | 63 |
| | AEGTFTSEYSKYLDERRAKDFVQWLMDT | | |
| 8 | [A2E3, E16K20(Lactam), D28]G(1~29) | 0.2 | 130 (PA) |
| | HAEGTFTSEYSKYLDERRAKDFVQWLMDT | | |
| 9 | ANK2 (Bayer peptide) | 0.28 | agonist |
| | HSQGTFTSDY ARYLDARRAREFIKWL VRGRG | | |

*EC50 at glucagon receptor

TABLE 15
Profile of Mixed Agonist/Antagonist
Glucagon (6-CEX) Analogs

| | | | | |
|---|---|---|---|---|
| 1 | E9, K12, E16 | FTSEYSKYLDERRAQDFVQWLMNTGPSSGAPPPS | 1451 | 762 |
| 2 | E9, K12E16(lactam) | FTSEYSKYLDERRAQDFVQWLMNTGPSSGAPPPS | 63 | 2008 |
| 3 | E9, E16K20(lactam) | FTSEYSKYLDERRAKDFVQWLMNTGPSSGAPPPS | 36 | 42 |
| 4 | D9, K12E20(lactam) | FTSDYSKYLDERRAQDFVQWLIMNTGPSSGAPPPS | 18 | 828 |
| 5 | [PLA6, E9, K12E20(lactam) | PLA-TSEYSKYLDERRAQDFVQWLMNTGPSSGAPPPS | 6 | 72 |
| 6 | [PLA6, E9, El6K20(Lactam)] | PLA-TSEYSKYLDERRAKDFVQWLMNTGPSSGAPPPS | 20 | 20 |

Glucagon D9(6-29) analogs

| | | | | |
|---|---|---|---|---|
| | | | GLP-1 | Glucagon |
| | | | EC50 | IC50 |
| | | | (nM) | (nM) |
| 7 | PLA 6, D9, D28 | PLA-TSDYSKYLDSRRAQDFVQWLMDT | −700 | tbd |
| 8 | PLA6, D9, | PLA-TSDYSKYLDERRAQDFVQWLMDT | 21 | 13 |
| | Kl2E20(Lactam) | | | |
| 9 | PLA6, D9, E16K20(lactam) | PLA-TSDYSKYLDERRAKDFVQWLMDT | 4 | 6 |

[1020] In some embodiments, the peptide comprising the general structure A-B-C is a Class peptide. In a specific embodiment, the peptide exhibits at least about 50% of the maximum agonism achieved by native GLP-1 at the GLP-1 receptor and at least about 50% inhibition of the maximum response achieved by native glucagon at the glucagon receptor. In another specific embodiment, the peptide exhibits at least about 55%, at least about 60%, at least about 70%, at least about 80%, at least about 90%, at least about 95%, or about 100% of the maximum agonism achieved by native GLP-1 at the GLP-1 receptor. Alternatively or additionally, the peptide may exhibit at least about 55%, at least about 60%, at least about 70%, at least about 80%, at least about 90%, at least about 95%, or about 100% inhibition of the maximum response achieved by native glucagon at the glucagon receptor.

[1021] In some embodiments, a peptide with Class 5 peptide or conjugate thereof, is provided comprising:

(1) modifications that confer glucagon antagonist activity, including but not limited to:

[1022] (a) substitution of the Phe at position 6 with PLA (according to amino acid numbering of wild type glucagon), optionally with deletion of 1 to 5 amino acids from the N-terminus of wild type glucagon; or

[1023] (b) deletion of 2 to 5 amino acids from the N-terminus of wild type glucagon; optionally with substitution of Asp at position 9 of wild type glucagon with glutamic acid, homoglutamic acid or a sulfonic acid derivative of cysteine (according to amino acid numbering of wild type glucagon); and

(2) modifications that confer GLP-1 agonist activity, including but not limited to:

[1024] (a) insertion or substitution of α,α-disubstituted amino acid within amino acids 12-29 of wild type glucagon, e.g. at one, two, three, four or more of positions 16, 17, 18, 19, 20, 21, 24 or 29 (according to the amino acid numbering of wild type glucagon); or

[1025] (b) introduction of an intramolecular bridge within amino acids 12-29 of wild type glucagon, e.g. a salt bridge or a lactam bridge or another type of covalent bond; or

[1026] (c) substitution of the amino acid at one or more of positions 2, 3, 17, 18, 21, 23, or 24 (according to the amino acid numbering of native glucagon) with the corresponding amino acid of GLP-1, e.g. Ser2 is replaced with Ala, Gln3 is replaced with Glu, Arg17 is replaced with Gln, Arg at position 18 is replaced with Ala, Asp at position 21 is replaced with Glu, Val at position 23 is replaced with Ile, and/or Gln at position 24 is replaced with Ala; or

[1027] (d) other modifications that stabilize the alpha-helix structure around amino acid positions 12-29 according to the amino acid numbering of wild type glucagon; and

(3) other modifications that enhance GLP-1 agonist activity, e.g. a C-terminal amide or ester in place of a C-terminal carboxylate; and optionally
(4) one or more of the following modifications:

[1028] (a) covalent attachment to a hydrophilic moiety, such as polyethylene glycol, e.g. at the N-terminus, or at position 6, 16, 17, 20, 21, 24, 29, 40 or at the C-terminal amino acid; and/or

[1029] (b) acylation or alkylation; and optionally

(5) one or more of the following additional modifications:

[1030] (a) covalent linkage of amino acids, to the N-terminus, e.g. 1-5 amino acids to the N-terminus, optionally via an ester bond to PLA at position 6 (according to the numbering of wild type glucagon), optionally together with modifications at position 1 or 2, e.g. as described herein, that improve resistance to DPP-IV cleavage;

[1031] (b) deletion of amino acids at positions 29 and/or 28, and optionally position 27 (according to the numbering of wild type glucagon);

[1032] (c) covalent linkage of amino acids to the C-terminus;

[1033] (d) non-conservative substitutions, conservative substitutions, additions or deletions while retaining desired activity, for example, conservative substitutions at one or more of positions 2, 5, 7, 10, 11, 12, 13, 14, 16, 17, 18, 19, 20, 21, 24, 27, 28 or 29, substitution of Tyr at position 10 with Val or Phe, substitution of Lys at position 12 with Arg, substitution of one or more of these positions with Ala;

[1034] (e) modification of the aspartic acid at position 15, for example, by substitution with glutamic acid, homoglutamic acid, cysteic acid or homocysteic acid, which may reduce degradation; or modification of the serine at position 16, for example, by substitution of threonine, Aib, glutamic acid or with another negatively charged amino acid having a side chain with a length of 4 atoms, or alternatively with any one of glutamine, homoglutamic acid, or homocysteic acid, which likewise may reduce degradation due to cleavage of the Asp15-Ser16 bond;

[1035] (f) modification of the methionine at position 27, for example, by substitution with leucine or norleucine, to reduce oxidative degradation;

[1036] (g) modification of the Gln at position 20 or 24, e.g. by substitution with Ala or Aib, to reduce degradation that occurs through deamidation of Gln

[1037] (h) modification of Asp at position 21, e.g. by substitution with Glu, to reduce degradation that occurs through dehydration of Asp to form a cyclic succinimide intermediate followed by isomerization to iso-aspartate;

[1038] (j) homodimerization or heterodimerization as described herein; and

[1039] (k) combinations of the above.

[1040] It is understood that any of the modifications within the same class may be combined together and/or modifications of different classes are combined. For example, the modifications of (1)(a) may be combined with (2)(a) and (3); (1)(a) may be combined with (2)(b), e.g. lactam bridge or salt bridge, and (3); (1)(a) may be combined with (2)(c) and (3); (1)(b) may be combined with (2)(a) and (3); (1)(b) may be combined with (2)(b), e.g. lactam bridge or salt bridge, and (3); (1)(b) may be combined with (2)(c) and (3); any of the foregoing may be combined with (4)(a) and/or (4)(b); and any of the foregoing may be combined with any of (5)(a) through (5)(k).

[1041] In exemplary embodiments, the α,α-disubstituted amino acid Aib is substituted at one, two, three or all of positions 16, 20, 21, or 24 (according to the amino acid numbering of wild type glucagon).

[1042] In exemplary embodiments, the intramolecular bridge is a salt bridge.

[1043] In other exemplary embodiments, the intramolecular bridge is a covalent bond, e.g. a lactam bridge. In some embodiments, the lactam bridge is between the amino acids at positions 9 and 12, the amino acids at positions 12 and 16, the amino acids at positions 16 and 20, the amino acids at positions 20 and 24, or the amino acids at positions 24 and 28 (according to the amino acid numbering of SEQ ID NO: 1401).

[1044] In exemplary embodiments, acylation or alkylation is at position 6, 10, 20 or 24 or the N-terminus or C-terminus (according to the amino acid numbering of wild type glucagon) SEQ ID NO: 1401).

[1045] In exemplary embodiments, modifications include:

[1046] (i) substitution of Asp at position 15 (according to the numbering of SEQ ID NO: 1401) with cysteic acid, glutamic acid, homoglutamic acid, and homocysteic acid;

[1047] (ii) substitution of Ser at position 16 (according to the numbering of SEQ ID NO: 1401) with cysteic acid, glutamic acid, homoglutamic acid, and homocysteic acid;

[1048] (iii) substitution of Asn at position 28 with a charged amino acid;

[1049] (iv) substitution of Asn at position 28 with a charged amino acid selected from the group consisting of Lys, Arg, H is, Asp, Glu, cysteic acid, and homocysteic acid;

[1050] (v) substitution at position 28 with Asn, Asp, or Glu;

[1051] (vi) substitution at position 28 with Asp;

[1052] (vii) substitution at position 28 with Glu;

[1053] (viii) substitution of Thr at position 29 with a charged amino acid;

[1054] (ix) substitution of Thr at position 29 with a charged amino acid selected from the group consisting of Lys, Arg, H is, Asp, Glu, cysteic acid, and homocysteic acid;

[1055] (x) substitution at position 29 with Asp, Glu, or Lys;

[1056] (xi) substitution at position 29 with Glu;

[1057] (xii) insertion of 1-3 charged amino acids after position 29;

[1058] (xiii) insertion after position 29 of Glu or Lys;

[1059] (xiv) insertion after position 29 of Gly-Lys or Lys-Lys; or combinations thereof.

[1060] Any of the modifications described above which increase GLP-1 receptor agonist activity, glucagon receptor antagonist activity, peptide solubility, and/or peptide stability can be applied individually or in combination.

### Modification to Enhance Stability

[1061] In accordance with some embodiments the Class 5 peptides disclosed herein can be further modified to include the amino acid sequence of SEQ ID NO: 1421 (GPSSGAPPPS), or SEQ ID NO: 1450, linked to the carboxy terminal amino acid (position 24) of the Class 5 peptide and administered to individuals to induce weight loss or assist in weight maintenance. More particularly, the Class 5 peptide comprises a sequence selected from the group consisting of SEQ ID NO: 1405, SEQ ID NO: 1406, SEQ ID NO: 1407, SEQ ID NO: 1408, SEQ ID NO: 1409, SEQ ID NO: 1412, SEQ ID NO: 1413, SEQ ID NO: 1414, SEQ ID NO: 1416, SEQ ID NO: 1417, SEQ ID NO: 1418, SEQ ID NO: 1419, SEQ ID NO: 1422, SEQ ID NO: 1423, SEQ ID NO: 1424 and SEQ ID NO: 1425 and further comprising the amino acid sequence of SEQ ID NO: 1421 (GPSSGAPPPS), or SEQ ID NO: 1450, linked to the carboxy terminal amino acid (position 24) of the peptide or Class 5 peptide, is used to suppress appetite and inducing weight loss/weight maintenance. In some embodiments the administered peptide or Class 5 peptide comprises a sequence selected from the group consisting of SEQ ID NO: 1416, SEQ ID NO: 1417, SEQ ID NO: 1418 and SEQ ID NO: 1419, further comprising the amino acid sequence of SEQ ID NO: 1421 (GPSSGAPPPS) linked to the carboxy terminal amino acid (position 24) of the Class 5 peptide. In some embodiments the method comprises administering a peptide or Class 5 peptide comprising the sequence of SEQ ID NO: 1445 or SEQ ID NO: 1446.

[1062] Accordingly, it is expected that the Class 5 peptides disclosed herein can be similarly modified to decrease their susceptibility to premature chemical cleavage in aqueous buffers. In accordance with some embodiments the Class 5 peptides described herein can be further modified to enhance their stability in aqueous solutions by replacing the native aspartic amino acid, located at corresponding position 15 of native glucagon, with an amino acid selected from the group consisting of cysteic acid, glutamic acid, homoglutamic acid and homocysteic acid. In accordance with some embodiments the aspartic acid residue at position 10 of class 5 peptide of SEQ ID NO: 1405, SEQ ID NO: 1406, SEQ ID NO: 1407 or SEQ ID NO: 1408 can be substituted with an amino acid selected from the group consisting of cysteic acid, glutamic acid, homoglutamic acid and homocysteic acid, and in some embodiments the native aspartic acid at position 10 of SEQ ID NO: 1405, SEQ ID NO: 1406, SEQ ID NO: 1407 or SEQ ID NO: 1408 is replaced with glutamic acid. In accordance with some embodiments a class 5 peptide having improved stability in aqueous solutions is provided wherein the antagonist comprises a modified sequence of SEQ ID NO: 1409, wherein the modification comprises substitution of the Asp at position 10 of SEQ ID NO: 1409 with Glu. In some embodiments a class 5 peptide is provided comprising a sequence selected form the group consisting of SEQ ID NO: 1422, SEQ ID NO: 1423, SEQ ID NO: 1424 and SEQ ID NO: 1425. In some embodiments the class 5 peptide is amidated.

[1063] The Asp-Ser sequence at position 15-16 of native glucagon has been identified as a uniquely unstable dipeptide that leads to premature chemical cleavage of the native hormone in aqueous buffers. For example, when maintained at 0.01N HCl at 37° C. for 2 weeks, more than 50% of the native glucagon may be cleaved into fragments. The two liberated cleavage peptides 1-15 and 16-29 are devoid of glucagon-like biological activity and thus represent a limitation on the aqueous pre-formulation of glucagon and its related analogs. The selective chemical substitution of the Asp at position 15 of native glucagon with Glu has been observed to virtually eliminate chemical cleavage of the 15-16 peptide bond.

[1064] In yet further exemplary embodiments, any of the foregoing compounds can be further modified to improve stability by modifying the amino acid corresponding to position 15 or 16 of native glucagon, to reduce degradation of the peptide over time, especially in acidic or alkaline buffers.

### Modification to Enhance Solubility

[1065] The class 5 peptide can be further modified to improve the peptide's solubility in aqueous solutions at physiological pH, in certain aspects, while retaining the glucagon antagonist and GLP-1 agonist activity. Introduction of hydrophilic groups at positions corresponding to positions 12, 15, 16, 19 and 24 of the peptide of SEQ ID NO: 1405, or at positions 12, 16, 19 or 24 of the peptide of SEQ ID NO: 1406 can improve the solubility of the resulting peptides in solutions having a physiological pH, while retaining the parent compounds glucagon antagonist and GLP agonist activity. Therefore, in some embodiments the presently disclosed class 5 peptide that are further modified to comprise one or more hydrophilic groups covalently linked to the side chains of amino acids corresponding to amino acid positions 12, 15, 16, 19 and 24 of the peptide of SEQ ID NO: 1405 or SEQ ID NO: 1406. In a further embodiment the side chains of amino acids corresponding to amino acid positions 16 and 19 of SEQ ID NO: 1405 or SEQ ID NO: 1406 are covalently bound to hydrophilic groups, and in some embodiments the hydrophilic group is polyethylene glycol (PEG).

[1066] Class 5 glucagon related peptides can be modified by introducing charge at its carboxy terminus to enhance the solubility of the peptide while retaining the agonist properties of the peptide. The enhanced solubility allows for the preparation and storage of glucagon solutions at near neutral pH. Formulating glucagon solutions at relatively neutral pHs (e.g. pH of about 6.0 to about 8.0) improves the long term stability of the Class 5 peptides.

[1067] Applicants anticipate that class 5 peptides disclosed herein can be similarly modified to enhance their solubility in aqueous solutions at relatively neutral pH (e.g. pH of about 6.0 to about 8.0), in some cases, while retaining a glucagon antagonist and GLP-1 activity. Accordingly, some embodiments is directed to a glucagon antagonist/GLP-1 of SEQ ID NO: 1405, SEQ ID NO: 1406, SEQ ID NO: 1407 or SEQ ID NO: 1408 that has been further modified relative to the native amino acids present at positions 6-29 of the wild type glucagon (SEQ ID NO: 1401) to add charge to the peptide by the substitution of native non-charged amino acids with charged amino acids, or the addition of charged amino acids to the carboxy terminus. In accordance with some embodiments, one to three of the non-charged native amino acids of the class 5 peptides disclosed herein are replaced with a charged amino acid. In some embodiments the charged amino acid is selected from the group consisting of lysine, arginine, histidine, aspartic acid and glutamic acid. More particularly, applicants have discovered that substituting the normally occurring amino acid corresponding to position 28 and/or 29 (relative to native glucagon) with charged amino acids, and/or the addition of one to two charged amino acids at the carboxy terminus of the peptide, enhances the solubility and stability of the Class 5 peptide in aqueous solutions at physiologically relevant pHs (i.e., a pH of about 6.5 to about 7.5). Accordingly such modifications of class 5 peptides are anticipated to have a similar effect on the solubility in aqueous solutions, particularly at a pH ranging from about 5.5 to about 8.0, while retaining the parent peptides biological activity.

[1068] In accordance with some embodiments the class 5 peptide of SEQ ID NO: 1405, SEQ ID NO: 1406, SEQ ID NO: 1407 or SEQ ID NO: 1408 is modified by the substitution of the native amino acid at position 23 and/or 24 of those sequences with a negatively charged amino acid (e.g., aspartic acid or glutamic acid) and optionally the addition of a negatively charged amino acid (e.g., aspartic acid or glutamic acid) to the carboxy terminus of the peptide. In an alternative embodiment a class 5 peptide comprising SEQ ID NO: 1405, SEQ ID NO: 1406, SEQ ID NO: 1407 or SEQ ID NO: 1408 is modified by the substitution of the native amino acid at position 24 of SEQ ID NO: 1405, SEQ ID NO: 1406, SEQ ID NO: 1407 or SEQ ID NO: 1408 with a positively charged amino acid (e.g., lysine, arginine or histidine) and optionally the addition of one or two positively charged amino acid (e.g., lysine, arginine or histidine) on the carboxy terminus of the peptide. In accordance with some embodiments a class 5 peptide having improved solubility and stability is provided wherein the analog comprises the amino acid sequence of SEQ ID NO: 1415 or SEQ ID NO: 1451 with the proviso that at least one amino acids at position, 23, or 24 of SEQ ID NO: 1415 or SEQ ID NO: 1451 is substituted with an acidic amino acid and/or an additional acidic amino acid added at the carboxy terminus of SEQ ID NO: 1415 or SEQ ID NO: 1451. In some embodiments the acidic amino acids are independently selected from the group consisting of Asp, Glu, cysteic acid and homocysteic acid.

[1069] In accordance with some embodiments a class 5 peptide having improved solubility and stability is provided wherein the antagonist comprises the amino acid sequence of SEQ ID NO: 1416, SEQ ID NO: 1417, SEQ ID NO: 1418 or SEQ ID NO: 1419. In accordance with some embodiments a glucagon agonist is provided comprising the sequence of SEQ ID NO: 1416 or SEQ ID NO: 1417. In some embodiments the class 5 peptide comprises the sequence of SEQ ID NO: 1420.

[1070] In accordance with some embodiments a class 5 peptide is provided comprising the sequence of SEQ ID NO: 1415 or SEQ ID NO: 1451. In some embodiments, position 4 of SEQ ID NO: 1415 or SEQ ID NO: 1451 is aspartic acid, glutamic acid, homoglutamic acid, cysteic acid or homocysteic acid, and in some embodiments position 4 is aspartic acid, glutamic acid, cysteic acid or homocysteic acid, and in a further embodiment position 4 of SEQ ID NO: 1415 or SEQ ID NO: 1451 is aspartic acid or glutamic acid, and in some embodiments position 4 of SEQ ID NO: 1415 or SEQ ID NO: 1451 is aspartic acid. In some embodiments a class 5 peptide is provided comprising the sequence of SEQ ID NO: 1415 or SEQ ID NO: 1451 wherein position 4 of SEQ ID NO: 1415 is aspartic acid and position 10 of SEQ ID NO: 1415 is glutamic acid. In a further embodiment the C-terminal amino acid of SEQ ID NO: 1415 or SEQ ID NO: 1451 is modified to replace the native carboxylic acid group with a charge-neutral group, such as an amide or ester.

### Class 5 Peptide Fusions

[1071] In a further embodiment, the carboxy terminal amino acid of the Class 5 peptide described herein is covalently bound to a second peptide comprising a sequence selected from the group consisting of SEQ ID NOs: 1421, 1426, 1427, and 1450. For example, in some embodiments, the Class 5 peptide of SEQ ID NO: 1415, SEQ ID NO: 1451, SEQ ID NO: 1405,

[1072] SEQ ID NO: 1406, SEQ ID NO: 1407, SEQ ID NO: 1408, SEQ ID NO: 1412, SEQ ID NO: 1413, SEQ ID NO: 1414, SEQ ID NO: 1416, SEQ ID NO: 1417, SEQ ID NO: 1418, SEQ ID NO: 1419, SEQ ID NO: 1422, SEQ ID NO: 1423, SEQ ID NO: 1424 and SEQ ID NO: 1425 is covalently bound to a second peptide comprising a sequence selected from the group consisting of SEQ ID NO: 1421 (GPSSGAPPPS), SEQ ID NO: 1426 (KRNRNNIA), SEQ ID NO: 1427 (KRNR) and SEQ ID NO: 1450 (GPSSGAPPPSX).

[1073] In some embodiments a class 5 peptide dimer is provided comprising two sequences independently selected from the group consisting of SEQ ID NO: 1405, SEQ ID NO: 1406, SEQ ID NO: 1407, SEQ ID NO: 1408, SEQ ID NO: 1409, SEQ ID NO: 1422, SEQ ID NO: 1423, SEQ ID NO: 1424 and SEQ ID NO: 1425 that further comprises an amino acid sequence of SEQ ID NO: 1421 (GPSSGAPPPS) linked to the carboxy terminal amino acid of the class 5 peptide.

[1074] In some embodiments, the class 5 peptide is further modified by truncation or deletion of one or two amino acids of the C-terminus of the peptide (i.e., truncation of the amino acid at position 29 or at positions 28 and 29 of native glucagon). Preferably truncation does not effect activity (e.g., glucagon antagonism/GLP-1 agonism) of a class 5 peptide.

### Class 5 Peptide Conjugates

[1075] Conjugates of Class 5 peptides are also provided, in which the glucagon peptide is linked, optionally via covalent bonding and optionally via a linker, to a conjugate moiety.

[1076] In those embodiments wherein the class 5 peptide comprises a polyethylene glycol chain, the polyethylene glycol chain may be in the form of a straight chain or it may be branched. In accordance with some embodiments the polyethylene glycol chain has an average molecular weight selected from the range of about 500 to about 10,000 Daltons. In some embodiments the polyethylene glycol chain has an average molecular weight selected from the range of about 1,000 to about 5,000 Daltons. In some embodiments the polyethylene glycol chain has an average molecular weight selected from the range of about 1,000 to about 5,000 Daltons. In some embodiments the polyethylene glycol chain has an average molecular weight selected of about 1,000 to about 2,000 Daltons. In some embodiments the polyethylene glycol chain has an average molecular weight of about 1,000 Daltons.

[1077] In some embodiments the pegylated class 5 peptide comprises a peptide consisting of the sequence of SEQ ID NO: 1415 or SEQ ID NO: 1451 wherein the polyethylene glycol chain is linked to an amino acid selected from positions 11, 12, 15, 16, 19 and 24 of SEQ ID NO: 1415 or SEQ ID NO: 1451, and the molecular weight of the PEG chain is about 1,000 to about 5,000 Daltons. In some embodiments the pegylated class 5 peptide comprises a peptide consisting of the sequence of SEQ ID NO: 1415 or SEQ ID NO: 1451 wherein the polyethylene glycol chain is linked to the amino acid at position 16 or 19 of SEQ ID NO: 1415 or SEQ ID NO: 1451, and the molecular weight of the PEG chain is about 1,000 to about 5,000 Daltons. In a further embodiment the modified class 5 peptide comprises two or more polyethylene glycol chains covalently bound to the peptide wherein the total molecular weight of the glucagon chains is about 1,000 to about 5,000 Daltons. In some embodiments the class 5 peptide comprises the sequence of SEQ ID NO: 1415 or SEQ ID NO: 1451 wherein a polyethylene glycol chain is linked to the amino acid at positions 16 and 19 of SEQ ID NO: 1415 or SEQ ID NO: 1451 and the combined molecular weight of the two PEG chains is about 1,000 to about 5,000 Daltons.

[1078] The class 5 glucagon related peptide may comprise the amino acid sequence of any of SEQ ID NOs: 1401-1518, optionally with up to 1, 2, 3, 4, or 5 further modifications that retain glucagon antagonist and GLP-1 agonist activity.

### The Linking Group (L)

[1079] As described herein, the present disclosures provide glucagon superfamily peptides conjugated with NHR ligands having the formula Q-L-Y, wherein L is a linking group or a chemical bond. In some embodiments, L is stable in vivo. In some embodiments, L is hydrolyzable in vivo. In some embodiments, L is metastable in vivo.

[1080] Q and Y can be linked together through L using standard linking agents and procedures known to those skilled in the art. In some aspects, Q and Y are fused directly and L is a bond. In other aspects, Q and Y are fused through a linking group L. For example, in some embodiments, Q and Y are linked together via a peptide bond, optionally through a peptide or amino acid spacer. In some embodiments, Q and Y are linked together through chemical conjugation, optionally through a linking group (L). In some embodiments, L is directly conjugated to each of Q and Y.

[1081] Chemical conjugation can occur by reacting a nucleophilic reactive group of one compound to an electrophilic reactive group of another compound. In some embodiments when L is a bond, Q is conjugated to Y either by reacting a nucleophilic reactive moiety on Q with an electrophilic reactive moiety on Y, or by reacting an electrophilic reactive moiety on Q with a nucleophilic reactive moiety on Y. In embodiments when L is a group that links Q and Y together, Q and/or Y can be conjugated to L either by reacting a nucleophilic reactive moiety on Q and/or Y with an electrophilic reactive moiety on L, or by reacting an electrophilic reactive moiety on Q and/or Y with a nucleophilic reactive moiety on L. Nonlimiting examples of nucleophilic reactive groups include amino, thiol, and hydroxyl. Nonlimiting examples of electrophilic reactive groups include carboxyl, acyl chloride, anhydride, ester, succinimide ester, alkyl halide, sulfonate ester, maleimido, haloacetyl, and isocyanate. In embodiments where Q and Y are conjugated together by reacting a carboxylic acid with an amine, an activating agent can be used to form an activated ester of the carboxylic acid.

[1082] The activated ester of the carboxylic acid can be, for example, N-hydroxysuccinimide (NHS), tosylate (Tos), mesylate, triflate, a carbodiimide, or a hexafluorophosphate. In some embodiments, the carbodiimide is 1,3-dicyclohexylcarbodiimide (DCC), 1,1′-carbonyldiimidazole (CDI), 1-ethyl-3-(3-dimethylaminopropyl)carbodiimide hydrochloride (EDC), or 1,3-diisopropylcarbodiimide (DICD). In some embodiments, the hexafluorophosphate is selected from a group consisting of hexafluorophosphate benzotriazol-1-yl-oxy-tris(dimethylamino)phosphonium hexafluorophosphate (BOP), benzotriazol-1-yl-oxytripyrrolidinophosphonium hexafluorophosphate (PyBOP), 2-(1H-7-azabenzotriazol-1-yl)-1,1,3,3-tetramethyl uronium hexafluorophosphate (HATU), and o-benzotriazole-N,N,N′,N′-tetramethyl-uronium-hexafluoro-phosphate (HBTU).

[1083] In some embodiments, Q comprises a nucleophilic reactive group (e.g. the amino group, thiol group, or hydroxyl group of the side chain of lysine, cysteine or serine) that is capable of conjugating to an electrophilic reactive group on Y or L. In some embodiments, Q comprises an electrophilic reactive group (e.g. the carboxylate group of the side chain of Asp or Glu) that is capable of conjugating to a nucleophilic reactive group on Y or L. In some embodiments, Q is chemically modified to comprise a reactive group that is capable of conjugating directly to Y or to L. In some embodiments, Q is modified at the C-terminal to comprise a natural or nonnatural amino acid with a nucleophilic side chain, such as an amino acid represented by Formula I, Formula II, or Formula III, as previously described herein (see Acylation and alkylation). In exemplary embodiments, the C-terminal amino acid of Q is selected from the group consisting of lysine, ornithine, serine, cysteine, and homocysteine. For example, the C-terminal amino acid of Q can be modified to comprise a lysine residue. In some embodiments, Q is modified at the C-terminal amino acid to comprise a natural or nonnatural amino acid with an electrophilic side chain such as, for example, Asp and Glu. In some embodiments, an internal amino acid of Q is substituted with a natural or nonnatural amino acid having a nucleophilic side chain, such as an amino acid represented by Formula I, Formula II, or Formula III, as previously described herein (see Acylation and alkylation). In exemplary embodiments, the internal amino acid of Q that is substituted is selected from the group consisting of lysine, ornithine, serine, cysteine, and homocysteine. For example, an internal amino acid of Q can be substituted with a lysine residue. In some embodiments, an internal amino acid of Q is substituted with a natural or nonnatural amino acid with an electrophilic side chain, such as, for example, Asp and Glu.

[1084] In some embodiments, Y comprises a reactive group that is capable of conjugating directly to Q or to L. In some embodiments, Y comprises a nucleophilic reactive group (e.g. amine, thiol, hydroxyl) that is capable of conjugating to an electrophilic reactive group on Q or L. In some embodiments, Y comprises electrophilic reactive group (e.g. carboxyl group, activated form of a carboxyl group, compound with a leaving group) that is capable of conjugating to a nucleophilic reactive group on Q or L. In some embodiments, Y is chemically modified to comprise either a nucleophilic reactive group that is capable of conjugating to an electrophilic reactive group on Q or L. In some embodiments, Y is chemically modified to comprise an electrophilic reactive group that is capable of conjugating to a nucleophilic reactive group on Q or L.

[1085] In some embodiments, conjugation can be carried out through organosilanes, e,g, aminosilane treated with glutaraldehyde; carbonyldiimidazole (CDI) activation of silanol groups; or utilization of dendrimers. A variety of dendrimers are known in the art and include poly (amidoamine) (PAMAM) dendrimers, which are synthesized by the divergent method starting from ammonia or ethylenediamine initiator core reagents; a sub-class of PAMAM dendrimers based on a tris-aminoethylene-imine core; radially layered poly(amidoamine-organosilicon) dendrimers (PAMAMOS), which are inverted unimolecular micelles that consist of hydrophilic, nucleophilic polyamidoamine (PAMAM) interiors and hydrophobic organosilicon (OS) exteriors; Poly (Propylene Imine) (PPI) dendrimers, which are generally poly-alkyl amines having primary amines as end groups, while the dendrimer interior consists of numerous of tertiary tris-propylene amines; Poly (Propylene Amine) (POPAM) dendrimers; Diaminobutane (DAB) dendrimers; amphiphilic dendrimers; micellar dendrimers which are unimolecular micelles of water soluble hyper branched polyphenylenes; polylysine dendrimers; and dendrimers based on poly-benzyl ether hyper branched skeleton.

[1086] In some embodiments, conjugation can be carried out through olefin metathesis. In some embodiments, Y and Q, Y and L, or Q and L both comprise an alkene or alkyne moiety that is capable of undergoing metathesis. In some embodiments a suitable catalyst (e.g. copper, ruthenium) is used to accelerate the metathesis reaction. Suitable methods of performing olefin metathesis reactions are described in the art. See, for example, Schafineister et al., J. Am. Chem. Soc. 122: 5891-5892 (2000), Walensky et al., Science 305: 1466-1470 (2004), and Blackwell et al., Angew, Chem., Int. Ed. 37: 3281-3284 (1998).

[1087] In some embodiments, conjugation can be carried out using click chemistry. A “click reaction” is wide in scope and easy to perform, uses only readily available reagents, and is insensitive to oxygen and water. In some embodiments, the click reaction is a cycloaddition reaction between an alkynyl group and an azido group to form a triazolyl group. In some embodiments, the click reaction uses a copper or ruthenium catalyst. Suitable methods of performing click reactions are described in the art. See, for example, Kolb et al., Drug Discovery Today 8:1128 (2003); Kolb et al., Angew. Chem. Int. Ed. 40:2004 (2001); Rostovtsev et al., Angew. Chem. Int. Ed. 41:2596 (2002); Tornoe et al., J. Org. Chem. 67:3057 (2002); Manetsch et al., J. Am. Chem. Soc. 126:12809 (2004); Lewis et al., Angew. Chem. Int. Ed. 41:1053 (2002); Speers, J. Am. Chem. Soc. 125:4686 (2003); Chan et al. Org. Lett. 6:2853 (2004); Zhang et al., J. Am. Chem. Soc. 127:15998 (2005); and Waser et al., J. Am. Chem. Soc. 127:8294 (2005).

[1088] Indirect conjugation via high affinity specific binding partners, e.g. streptavidin/biotin or avidin/biotin or lectin/carbohydrate is also contemplated.

Chemical Modification of Q and/or Y

[1089] In some embodiments, Q and/or Y are functionalized to comprise a nucleophilic reactive group or an electrophilic reactive group with an organic derivatizing agent. This derivatizing agent is capable of reacting with selected side chains or the N- or C-terminal residues of targeted amino acids on Q and functional groups on Y. Reactive groups on Q and/or Y include, e.g., aldehyde, amino, ester, thiol, α-haloacetyl, maleimido or hydrazino group. Derivatizing agents include, for example, maleimidobenzoyl sulfosuccinimide ester (conjugation through cysteine residues), N-hydroxysuccinimide (through lysine residues), glutaraldehyde, succinic anhydride or other agents known in the art. Alternatively, Q and/or Y can be linked to each other indirectly through intermediate carriers, such as polysaccharide or polypeptide carriers. Examples of polysaccharide carriers include aminodextran. Examples of suitable polypeptide carriers include polylysine, polyglutamic acid, polyaspartic acid, co-polymers thereof, and mixed polymers of these amino acids and others, e.g., serines, to confer desirable solubility properties on the resultant loaded carrier.

[1090] Cysteinyl residues most commonly are reacted with α-haloacetates (and corresponding amines), such as chloroacetic acid or chloroacetamide, to give carboxymethyl or carboxyamidomethyl derivatives. Cysteinyl residues also are derivatized by reaction with bromotrifluoroacetone, alpha-bromo-β-(5-imidozoyl)propionic acid, chloroacetyl phosphate, N-alkylmaleimides, 3-nitro-2-pyridyl disulfide, methyl 2-pyridyl disulfide, p-chloromercuribenzoate, 2-chloromercuri-4-nitrophenol, or chloro-7-nitrobenzo-2-oxa-1,3-diazole.

[1091] Histidyl residues are derivatized by reaction with diethylpyrocarbonate at pH 5.5-7.0 because this agent is relatively specific for the histidyl side chain. Para-bromophenacyl bromide also is useful; the reaction is preferably performed in 0.1 M sodium cacodylate at pH 6.0.

[1092] Lysinyl and amino-terminal residues are reacted with succinic or other carboxylic acid anhydrides. Derivatization with these agents has the effect of reversing the charge of the lysinyl residues. Other suitable reagents for derivatizing alpha-amino-containing residues include imidoesters such as methyl picolinimidate, pyridoxal phosphate, pyridoxal, chloroborohydride, trinitrobenzenesulfonic acid, O-methylisourea, 2,4-pentanedione, and transaminase-catalyzed reaction with glyoxylate.

[1093] Arginyl residues are modified by reaction with one or several conventional reagents, among them phenylglyoxal, 2,3-butanedione, 1,2-cyclohexanedione, and ninhydrin. Derivatization of arginine residues requires that the reaction be performed in alkaline conditions because of the high pKa of the guanidine functional group. Furthermore, these reagents may react with the groups of lysine as well as the arginine epsilon-amino group.

[1094] The specific modification of tyrosyl residues may be made, with particular interest in introducing spectral labels into tyrosyl residues by reaction with aromatic diazonium compounds or tetranitromethane. Most commonly, N-acetylimidizole and tetranitromethane are used to form O-acetyl tyrosyl species and 3-nitro derivatives, respectively.

[1095] Carboxyl side groups (aspartyl or glutamyl) are selectively modified by reaction with carbodiimides (R—N═C═N—R′), where R and R′ are different alkyl groups, such as 1-cyclohexyl-3-(2-morpholinyl-4-ethyl) carbodiimide or 1-ethyl-3-(4-azonia-4,4-dimethylpentyl) carbodiimide. Furthermore, aspartyl and glutamyl residues are converted to asparaginyl and glutaminyl residues by reaction with ammonium ions.

[1096] Other modifications include hydroxylation of proline and lysine, phosphorylation of hydroxyl groups of seryl or threonyl residues, methylation of the alpha-amino groups of lysine, arginine, and histidine side chains (T. E. Creighton, Proteins: Structure and Molecular Properties, W.H. Freeman & Co., San Francisco, pp. 79-86 (1983)), deamidation of asparagine or glutamine, acetylation of the N-terminal amine, and/or amidation or esterification of the C-terminal carboxylic acid group.

[1097] Another type of covalent modification involves chemically or enzymatically coupling glycosides to the peptide. Sugar(s) may be attached to (a) arginine and histidine, (b) free carboxyl groups, (c) free sulfhydryl groups such as those of cysteine, (d) free hydroxyl groups such as those of serine, threonine, or hydroxyproline, (e) aromatic residues such as those of tyrosine, or tryptophan, or (f) the amide group of glutamine. These methods are described in WO87/05330 published 11 Sep. 1987, and in Aplin and Wriston, CRC Crit. Rev. Biochem., pp. 259-306 (1981).

### Structure of L

[1098] In some embodiments, L is a bond. In these embodiments, Q and Y are conjugated together by reacting a nucleophilic reactive moiety on Q with and electrophilic reactive moiety on Y. In alternative embodiments, Q and Y are conjugated together by reacting an electrophilic reactive moiety on Q with a nucleophilic moiety on Y. In exemplary embodiments, L is an amide bond that forms upon reaction of an amine on Q (e.g. an ε-amine of a lysine residue) with a carboxyl group on Y. In alternative embodiments, Q and or Y are derivatized with a derivatizing agent before conjugation.

[1099] In some embodiments, L is a linking group. In some embodiments, L is a bifunctional linker and comprises only two reactive groups before conjugation to Q and Y. In embodiments where both Q and Y have electrophilic reactive groups, L comprises two of the same or two different nucleophilic groups (e.g. amine, hydroxyl, thiol) before conjugation to Q and Y. In embodiments where both Q and Y have nucleophilic reactive groups, L comprises two of the same or two different electrophilic groups (e.g. carboxyl group, activated form of a carboxyl group, compound with a leaving group) before conjugation to Q and Y. In embodiments where one of Q or Y has a nucleophilic reactive group and the other of Q or Y has an electrophilic reactive group, L comprises one nucleophilic reactive group and one electrophilic group before conjugation to Q and Y.

[1100] L can be any molecule with at least two reactive groups (before conjugation to Q and Y) capable of reacting with each of Q and Y. In some embodiments L has only two reactive groups and is bifunctional. L (before conjugation to the peptides) can be represented by Formula VI:

[chemical structure]

wherein A and B are independently nucleophilic or electrophilic reactive groups. In some embodiments A and B are either both nucleophilic groups or both electrophilic groups. In some embodiments one of A or B is a nucleophilic group and the other of A or B is an electrophilic group. Nonlimiting combinations of A and B are shown below.

| Both Nucleophilic | | Both Electrophilic | | Nucleophilic/Electrophilic | |
|---|---|---|---|---|---|
| A | B | A | B | A | B |
| amino | Amino | carboxyl | carboxyl | amino | carboxyl |
| amino | Thiol | carboxyl | acyl chloride | amino | acyl chloride |
| amino | hydroxyl | carboxyl | anhydride | amino | anhydride |
| thiol | Amino | carboxyl | Ester | amino | ester |
| thiol | Thiol | carboxyl | NHS | amino | NHS |
| thiol | hydroxyl | carboxyl | Halogen | amino | halogen |
| hydroxyl | Amino | carboxyl | sulfonate ester | amino | sulfonate ester |
| hydroxyl | Thiol | carboxyl | maleimido | amino | maleimido |
| hydroxyl | hydroxyl | carboxyl | haloacetyl | amino | haloacetyl |
| | | carboxyl | isocyanate | amino | isocyanate |
| | | acyl chloride | carboxyl | thiol | carboxyl |
| | | acyl chloride | acyl chloride | thiol | acyl chloride |
| | | acyl chloride | anhydride | thiol | anhydride |
| | | acyl chloride | Ester | thiol | ester |
| | | acyl chloride | NHS | thiol | NHS |
| | | acyl chloride | Halogen | thiol | halogen |
| | | acyl chloride | sulfonate ester | thiol | sulfonate ester |
| | | acyl chloride | maleimido | thiol | maleimido |
| | | acyl chloride | haloacetyl | thiol | haloacetyl |
| | | acyl chloride | isocyanate | thiol | isocyanate |
| | | anhydride | carboxyl | hydroxyl | carboxyl |
| | | anhydride | acyl chloride | hydroxyl | acyl chloride |
| | | anhydride | anhydride | hydroxyl | anhydride |
| | | anhydride | Ester | hydroxyl | ester |
| | | anhydride | NHS | hydroxyl | NHS |
| | | anhydride | Halogen | hydroxyl | halogen |
| | | anhydride | sulfonate ester | hydroxyl | sulfonate ester |
| | | anhydride | maleimido | hydroxyl | maleimido |
| | | anhydride | haloacetyl | hydroxyl | haloacetyl |
| | | anhydride | isocyanate | hydroxyl | isocyanate |
| | | ester | carboxyl | | |
| | | ester | acyl chloride | | |
| | | ester | anhydride | | |
| | | ester | Ester | | |
| | | ester | NHS | | |
| | | ester | Halogen | | |
| | | ester | sulfonate ester | | |
| | | ester | maleimido | | |
| | | ester | haloacetyl | | |
| | | ester | isocyanate | | |
| | | NHS | carboxyl | | |
| | | NHS | acyl chloride | | |
| | | NHS | anhydride | | |
| | | NHS | Ester | | |
| | | NHS | NHS | | |
| | | NHS | Halogen | | |
| | | NHS | sulfonate ester | | |
| | | NHS | maleimido | | |
| | | NHS | haloacetyl | | |
| | | NHS | isocyanate | | |
| | | halogen | carboxyl | | |
| | | halogen | acyl chloride | | |
| | | halogen | anhydride | | |
| | | halogen | Ester | | |
| | | halogen | NHS | | |
| | | halogen | Halogen | | |
| | | halogen | sulfonate ester | | |
| | | halogen | maleimido | | |
| | | halogen | haloacetyl | | |
| | | halogen | isocyanate | | |
| | | sulfonate ester | carboxyl | | |
| | | sulfonate ester | acyl chloride | | |
| | | sulfonate ester | anhydride | | |
| | | sulfonate ester | Ester | | |
| | | sulfonate ester | NHS | | |
| | | sulfonate ester | Halogen | | |
| | | sulfonate ester | sulfonate ester | | |
| | | sulfonate ester | maleimido | | |
| | | sulfonate ester | haloacetyl | | |
| | | sulfonate ester | isocyanate | | |
| | | maleimido | carboxyl | | |
| | | maleimido | acyl chloride | | |
| | | maleimido | anhydride | | |
| | | maleimido | Ester | | |
| | | maleimido | NHS | | |
| | | maleimido | Halogen | | |
| | | maleimido | sulfonate ester | | |
| | | maleimido | maleimido | | |
| | | maleimido | haloacetyl | | |
| | | maleimido | isocyanate | | |
| | | haloacetyl | carboxyl | | |
| | | haloacetyl | acyl chloride | | |
| | | haloacetyl | anhydride | | |
| | | haloacetyl | Ester | | |
| | | haloacetyl | NHS | | |
| | | haloacetyl | Halogen | | |
| | | haloacetyl | sulfonate ester | | |
| | | haloacetyl | maleimido | | |
| | | haloacetyl | haloacetyl | | |
| | | haloacetyl | isocyanate | | |
| | | isocyanate | carboxyl | | |
| | | isocyanate | acyl chloride | | |
| | | isocyanate | anhydride | | |
| | | isocyanate | Ester | | |
| | | isocyanate | NHS | | |
| | | isocyanate | Halogen | | |
| | | isocyanate | sulfonate ester | | |
| | | isocyanate | maleimido | | |
| | | isocyanate | haloacetyl | | |
| | | isocyanate | isocyanate | | |

In some embodiments, A and B may include alkene and/or alkyne functional groups that are suitable for olefin metathesis reactions. In some embodiments, A and B include moieties that are suitable for click chemistry (e.g. alkene, alkynes, nitriles, azides). Other nonlimiting examples of reactive groups (A and B) include pyridyldithiol, aryl azide, diazirine, carbodiimide, and hydrazide.

[1101] In some embodiments, L is hydrophobic. Hydrophobic linkers are known in the art. See, e.g., Bioconjugate Techniques, G. T. Hermanson (Academic Press, San Diego, Calif., 1996), which is incorporated by reference in its entirety. Suitable hydrophobic linking groups known in the art include, for example, 8-hydroxyoctanoic acid and 8-mercaptooctanoic acid. Before conjugation to the peptides of the composition, the hydrophobic linking group comprises at least two reactive groups (A and B), as described herein and as shown below:

[chemical structure]

[1102] In some embodiments, the hydrophobic linking group comprises either a maleimido or an iodoacetyl group and either a carboxylic acid or an activated carboxylic acid (e.g. NHS ester) as the reactive groups. In these embodiments, the maleimido or iodoacetyl group can be coupled to a thiol moiety on Q or Y and the carboxylic acid or activated carboxylic acid can be coupled to an amine on Q or Y with or without the use of a coupling reagent. Any coupling agent known to one skilled in the art can be used to couple the carboxylic acid with the free amine such as, for example, DCC, DIC, HATU, HBTU, TBTU, and other activating agents described herein. In specific embodiments, the hydrophilic linking group comprises an aliphatic chain of 2 to 100 methylene groups wherein A and B are carboxyl groups or derivatives thereof (e.g. succinic acid). In other specific embodiments the L is iodoacetic acid.

[chemical structure]

[1103] In some embodiments, the linking group is hydrophilic such as, for example, polyalkylene glycol. Before conjugation to the peptides of the composition, the hydrophilic linking group comprises at least two reactive groups (A and B), as described herein and as shown below:

[chemical structure]

In specific embodiments, the linking group is polyethylene glycol (PEG). The PEG in certain embodiments has a molecular weight of about 100 Daltons to about 10,000 Daltons, e.g. about 500 Daltons to about 5000 Daltons. The PEG in some embodiments has a molecular weight of about 10,000 Daltons to about 40,000 Daltons.

[1104] In some embodiments, the hydrophilic linking group comprises either a maleimido or an iodoacetyl group and either a carboxylic acid or an activated carboxylic acid (e.g. NHS ester) as the reactive groups. In these embodiments, the maleimido or iodoacetyl group can be coupled to a thiol moiety on Q or Y and the carboxylic acid or activated carboxylic acid can be coupled to an amine on Q or Y with or without the use of a coupling reagent. Any appropriate coupling agent known to one skilled in the art can be used to couple the carboxylic acid with the amine such as, for example, DCC, DIC, HATU, HBTU, TBTU, and other activating agents described herein In some embodiments, the linking group is maleimido-PEG(20 kDa)-COOH, iodoacetyl-PEG(20 kDa)-COOH, maleimido-PEG(20 kDa)-NHS, or iodoacetyl-PEG(20 kDa)-NHS.

[1105] In some embodiments, the linking group is comprised of an amino acid, a dipeptide, a tripeptide, or a polypeptide, wherein the amino acid, dipeptide, tripeptide, or polypeptide comprises at least two activating groups, as described herein. In some embodiments, the linking group (L) comprises a moiety selected from the group consisting of: amino, ether, thioether, maleimido, disulfide, amide, ester, thioester, alkene, cycloalkene, alkyne, trizoyl, carbamate, carbonate, cathepsin B-cleavable, and hydrazone.

[1106] In some embodiments, L comprises a chain of atoms from 1 to about 60, or 1 to 30 atoms or longer, 2 to 5 atoms, 2 to 10 atoms, 5 to 10 atoms, or 10 to 20 atoms long. In some embodiments, the chain atoms are all carbon atoms. In some embodiments, the chain atoms in the backbone of the linker are selected from the group consisting of C, O, N, and S. Chain atoms and linkers may be selected according to their expected solubility (hydrophilicity) so as to provide a more soluble conjugate. In some embodiments, L provides a functional group that is subject to cleavage by an enzyme or other catalyst or hydrolytic conditions found in the target tissue or organ or cell. In some embodiments, the length of L is long enough to reduce the potential for steric hindrance.

### Stability of L In Vivo

[1107] In some embodiments, L is stable in vivo. In some embodiments, L is stable in blood serum for at least 5 minutes, e.g. less than 25%, 20%, 15%, 10% or 5% of the conjugate is cleaved when incubated in serum for a period of 5 minutes. In other embodiments, L is stable in blood serum for at least 10, or 20, or 25, or 30, or 60, or 90, or 120 minutes, or 3, 4, 5, 6, 7, 8, 9, 10, 12, 15, 18 or 24 hours. In these embodiments, L does not comprise a functional group that is capable of undergoing hydrolysis in vivo. In some exemplary embodiments, L is stable in blood serum for at least about 72 hours. Nonlimiting examples of functional groups that are not capable of undergoing significant hydrolysis in vivo include amides, ethers, and thioethers. For example, the following compound is not capable of undergoing significant hydrolysis in vivo:

[chemical structure]

[1108] In some embodiments, L is hydrolyzable in vivo. In these embodiments, L comprises a functional group that is capable of undergoing hydrolysis in vivo. Nonlimiting examples of functional groups that are capable of undergoing hydrolysis in vivo include esters, anhydrides, and thioesters. For example the following compound is capable of undergoing hydrolysis in vivo because it comprises an ester group:

[chemical structure]

[1109] In some exemplary embodiments L is labile and undergoes substantial hydrolysis within 3 hours in blood plasma at 37° C., with complete hydrolysis within 6 hours. In some exemplary embodiments, L is not labile.

[1110] In some embodiments, L is metastable in vivo. In these embodiments, L comprises a functional group that is capable of being chemically or enzymatically cleaved in vivo (e.g., an acid-labile, reduction-labile, or enzyme-labile functional group), optionally over a period of time. In these embodiments, L can comprise, for example, a hydrazone moiety, a disulfide moiety, or a cathepsin-cleavable moiety. When L is metastable, and without intending to be bound by any particular theory, the Q-L-Y conjugate is stable in an extracellular environment, e.g., stable in blood serum for the time periods described above, but labile in the intracellular environment or conditions that mimic the intracellular environment, so that it cleaves upon entry into a cell. In some embodiments when L is metastable, L is stable in blood serum for at least about 24, 25, 26, 27, 28, 29, 30, 31, 32, 33, 34, 35, 36, 42, or 48 hours, for example, at least about 48, 54, 60, 66, or 72 hours, or about 24-48, 48-72, 24-60, 36-48, 36-72, or 48-72 hours.

### Q-L-Y Conjugates

### Conjugation of Q and Y

[1111] Conjugation of Q to Y through L can be carried out an any position within Q, including any of positions 1-29, a position within a C-terminal extension, or the C-terminal amino acid, provided that the activity of Q is retained, if not enhanced. Nonlimiting examples include positions 5, 7, 10, 11, 12, 13, 14, 15, 16, 17, 18, 19, 20, 21, 24, 27, 28, 29, 30, 37, 38, 39, 40, 41, 42, or 43 (according to the number of the amino acids of SEQ ID NO: 1601). In some embodiments, Y is conjugated to Q through L at one or more of positions 10, 20, 24, 30, 37, 38, 39, 40, 41, 32, or 43. In specific embodiments, Y is conjugated to Q through L at position 10 and/or 40 of Q.

### Activity

### Activity at the Glucagon Receptor and the Nuclear Hormone Receptor

[1112] In some embodiments, Q-L-Y exhibits activity at both the glucagon receptor and a nuclear hormone receptor. In some embodiments, the activity (e.g., the EC₅₀ or the relative activity or potency) of Q at the glucagon receptor is within about 100-fold, about 75-fold, about 60-fold, about 50-fold, about 40-fold, about 30-fold, about 20-fold, about 10-fold, or about 5 fold different (higher or lower) from the activity (e.g., the EC₅₀ or the relative activity or potency) of Y at a nuclear hormone receptor. In some embodiments, the glucagon potency of Q is within about 25-, about 20-, about 15-, about 10-, or about 5-fold different (higher or lower) from the potency of Y.

[1113] In some embodiments, the ratio of the relative activity or the EC₅₀ or the potency of the Q at the glucagon receptor divided by the relative activity or the EC₅₀ or potency of Y at a nuclear hormone receptor is less than, or is about, X, wherein X is selected from 100, 75, 60, 50, 40, 30, 20, 15, 10, or 5. In some embodiments, the ratio of the EC₅₀ or potency or relative activity of Q at the glucagon receptor divided by the EC₅₀ or potency or relative activity of Y at a nuclear hormone receptor is about 1 less than 5 (e.g., about 4, about 3, about 2, about 1). In some embodiments, the ratio of the glucagon potency of Q compared to the nuclear hormone potency of Y is less than, or is about, Z, wherein Z is selected from 100, 75, 60, 50, 40, 30, 20, 15, 10, and 5. In some embodiments, the ratio of the glucagon potency of Q compared to the nuclear hormone potency Y is less than 5 (e.g., about 4, about 3, about 2, about 1). In some embodiments, Q has an EC₅₀ at the glucagon receptor which is 2- to 10-fold (e.g., 2-fold, 3-fold, 4-fold, 5-fold, 6-fold, 7-fold, 8-fold, 9-fold, 10-fold) greater than the EC₅₀ of Y at a nuclear hormone receptor.

[1114] In some embodiments, the ratio of the relative activity or potency or the EC₅₀ of Y at a nuclear hormone receptor divided by the relative activity or potency or the EC₅₀ of Q at the glucagon receptor is less than, or is about, V, wherein V is selected from 100, 75, 60, 50, 40, 30, 20, 15, 10, or 5. In some embodiments, the ratio of the EC₅₀ or potency or relative activity of Y at a nuclear hormone receptor divided by the EC₅₀ or potency or relative activity of Q at the glucagon receptor is less than 5 (e.g., about 4, about 3, about 2, about 1). In some embodiments, the ratio of the nuclear hormone potency of Y compared to the glucagon potency of Q is less than, or is about, W, wherein W is selected from 100, 75, 60, 50, 40, 30, 20, 15, 10, and 5. In some embodiments, the ratio of the nuclear hormone potency of Y compared to the glucagon potency of Q is less than 5 (e.g., about 4, about 3, about 2, about 1). In some embodiments, Y has an EC₅₀ at a nuclear hormone receptor which is about 2- to about 10-fold (e.g., 2-fold, 3-fold, 4-fold, 5-fold, 6-fold, 7-fold, 8-fold, 9-fold, 10-fold) greater than the EC₅₀ of Q at the glucagon receptor.

[1115] In some embodiments, Y exhibits at least 0.1% (e.g., about 0.5% or more, about 1% or more, about 5% or more, about 10% or more, or more) of the activity of endogenous ligand at a nuclear hormone receptor (nuclear hormone potency) and Q exhibits at least 0.1% (e.g., about 0.5% or more, about 1% or more, about 5% or more, about 10% or more, or more) of the activity of native glucagon at the glucagon receptor (glucagon potency).

### Activity at the GLP-1 Receptor and the Nuclear Hormone Receptor

[1116] In some embodiments, Q-L-Y exhibits activity at both the GLP-1 receptor and a nuclear hormone receptor. In some embodiments, the activity (e.g., the EC₅₀ or the relative activity or potency) of Q at the GLP-1 receptor is within about 100-fold, about 75-fold, about 60-fold, about 50-fold, about 40-fold, about 30-fold, about 20-fold, about 10-fold, or about 5 fold different (higher or lower) from the activity (e.g., the EC₅₀ or the relative activity or potency) of Y at a nuclear hormone receptor. In some embodiments, the GLP-1 potency of Q is within about 25-, about 20-, about 15-, about 10-, or about 5-fold different (higher or lower) from the potency of Y.

[1117] In some embodiments, the ratio of the relative activity or the EC₅₀ or the potency of the Q at the GLP-1 receptor divided by the relative activity or the EC₅₀ or potency of Y at a nuclear hormone receptor is less than, or is about, X, wherein X is selected from 100, 75, 60, 50, 40, 30, 20, 15, 10, or 5. In some embodiments, the ratio of the EC₅₀ or potency or relative activity of Q at the GLP-1 receptor divided by the EC₅₀ or potency or relative activity of Y at a nuclear hormone receptor is about 1 less than 5 (e.g., about 4, about 3, about 2, about 1). In some embodiments, the ratio of the GLP-1 potency of Q compared to the nuclear hormone potency of Y is less than, or is about, Z, wherein Z is selected from 100, 75, 60, 50, 40, 30, 20, 15, 10, and 5. In some embodiments, the ratio of the GLP-1 potency of Q compared to the nuclear hormone potency Y is less than 5 (e.g., about 4, about 3, about 2, about 1). In some embodiments, Q has an EC₅₀ at the GLP-1 receptor which is 2- to 10-fold (e.g., 2-fold, 3-fold, 4-fold, 5-fold, 6-fold, 7-fold, 8-fold, 9-fold, 10-fold) greater than the EC₅₀ of Y at a nuclear hormone receptor.

[1118] In some embodiments, the ratio of the relative activity or potency or the EC₅₀ of Y at a nuclear hormone receptor divided by the relative activity or potency or the EC₅₀ of Q at the GLP-1 receptor is less than, or is about, V, wherein V is selected from 100, 75, 60, 50, 40, 30, 20, 15, 10, or 5. In some embodiments, the ratio of the EC₅₀ or potency or relative activity of Y at a nuclear hormone receptor divided by the EC₅₀ or potency or relative activity of Q at the GLP-1 receptor is less than 5 (e.g., about 4, about 3, about 2, about 1). In some embodiments, the ratio of the nuclear hormone potency of Y compared to the GLP-1 potency of Q is less than, or is about, W, wherein W is selected from 100, 75, 60, 50, 40, 30, 20, 15, 10, and 5. In some embodiments, the ratio of the nuclear hormone potency of Y compared to the GLP-1 potency of Q is less than 5 (e.g., about 4, about 3, about 2, about 1). In some embodiments, Y has an EC₅₀ at a nuclear hormone receptor which is about 2- to about 10-fold (e.g., 2-fold, 3-fold, 4-fold, 5-fold, 6-fold, 7-fold, 8-fold, 9-fold, 10-fold) greater than the EC₅₀ of Q at the GLP-1 receptor.

[1119] In some embodiments, Y exhibits at least 0.1% (e.g., about 0.5% or more, about 1% or more, about 5% or more, about 10% or more, or more) of the activity of endogenous ligand at a nuclear hormone receptor (nuclear hormone potency) and Q exhibits at least 0.1% (e.g., about 0.5% or more, about 1% or more, about 5% or more, about 10% or more, or more) of the activity of native GLP-1 at the GLP-1 receptor (GLP-1 potency).

### Activity at the GIP Receptor and the Nuclear Hormone Receptor

[1120] In some embodiments, Q-L-Y exhibits activity at both the GIP receptor and a nuclear hormone receptor. In some embodiments, the activity (e.g., the EC₅₀ or the relative activity or potency) of Q at the GIP receptor is within about 100-fold, about 75-fold, about 60-fold, about 50-fold, about 40-fold, about 30-fold, about 20-fold, about 10-fold, or about 5 fold different (higher or lower) from the activity (e.g., the EC₅₀ or the relative activity or potency) of Y at a nuclear hormone receptor. In some embodiments, the GIP potency of Q is within about 25-, about 20-, about 15-, about 10-, or about 5-fold different (higher or lower) from the potency of Y.

[1121] In some embodiments, the ratio of the relative activity or the EC₅₀ or the potency of the Q at the GIP receptor divided by the relative activity or the EC₅₀ or potency of Y at a nuclear hormone receptor is less than, or is about, X, wherein X is selected from 100, 75, 60, 50, 40, 30, 20, 15, 10, or 5. In some embodiments, the ratio of the EC₅₀ or potency or relative activity of Q at the GIP receptor divided by the EC₅₀ or potency or relative activity of Y at a nuclear hormone receptor is about 1 less than 5 (e.g., about 4, about 3, about 2, about 1). In some embodiments, the ratio of the GIP potency of Q compared to the nuclear hormone potency of Y is less than, or is about, Z, wherein Z is selected from 100, 75, 60, 50, 40, 30, 20, 15, 10, and 5. In some embodiments, the ratio of the GIP potency of Q compared to the nuclear hormone potency Y is less than 5 (e.g., about 4, about 3, about 2, about 1). In some embodiments, Q has an EC₅₀ at the GIP receptor which is 2- to 10-fold (e.g., 2-fold, 3-fold, 4-fold, 5-fold, 6-fold, 7-fold, 8-fold, 9-fold, 10-fold) greater than the EC₅₀ of Y at a nuclear hormone receptor.

[1122] In some embodiments, the ratio of the relative activity or potency or the EC₅₀ of Y at a nuclear hormone receptor divided by the relative activity or potency or the EC₅₀ of Q at the GIP receptor is less than, or is about, V, wherein V is selected from 100, 75, 60, 50, 40, 30, 20, 15, 10, or 5. In some embodiments, the ratio of the EC₅₀ or potency or relative activity of Y at a nuclear hormone receptor divided by the EC₅₀ or potency or relative activity of Q at the GIP receptor is less than 5 (e.g., about 4, about 3, about 2, about 1). In some embodiments, the ratio of the nuclear hormone potency of Y compared to the GIP potency of Q is less than, or is about, W, wherein W is selected from 100, 75, 60, 50, 40, 30, 20, 15, 10, and 5. In some embodiments, the ratio of the nuclear hormone potency of Y compared to the GIP potency of Q is less than 5 (e.g., about 4, about 3, about 2, about 1). In some embodiments, Y has an EC₅₀ at a nuclear hormone receptor which is about 2- to about 10-fold (e.g., 2-fold, 3-fold, 4-fold, 5-fold, 6-fold, 7-fold, 8-fold, 9-fold, 10-fold) greater than the EC₅₀ of Q at the GIP receptor.

[1123] In some embodiments, Y exhibits at least 0.1% (e.g., about 0.5% or more, about 1% or more, about 5% or more, about 10% or more, or more) of the activity of endogenous ligand at a nuclear hormone receptor (nuclear hormone potency) and Q exhibits at least 0.1% (e.g., about 0.5% or more, about 1% or more, about 5% or more, about 10% or more, or more) of the activity of native GIP at the GIP receptor (GIP potency).

### Prodrugs of Q-L-Y

[1124] In some aspects of the invention, prodrugs of Q-L-Y are provided wherein the prodrug comprises a dipeptide prodrug element (A-B) covalently linked to an active site of Q via an amide linkage, as disclosed in International Patent Application No. PCT US09/68745 (filed on Dec. 18, 2009), which is incorporated herein by reference in its entirety. Subsequent removal of the dipeptide under physiological conditions and in the absence of enzymatic activity, restores full activity to the Q-L-Y conjugate.

[1125] In some embodiments a prodrug of Q-L-Y is provided having the general structure of A-B-Q-L-Y. In these embodiments A is an amino acid or a hydroxy acid and B is an N-alkylated amino acid linked to Q through formation of an amide bond between a carboxyl of B (in A-B) and an amine of Q. Furthermore, in some embodiments, A, B, or the amino acid of Q to which A-B is linked, is a non-coded amino acid, and chemical cleavage of A-B from Q is at least about 90% complete within about 1 to about 720 hours in PBS under physiological conditions. In another embodiment, chemical cleavage of A-B from Q is at least about 50% complete within about 1 hour or about 1 week in PBS under physiological conditions.

[1126] In some embodiment the dipeptide prodrug element (A-B) comprises a compound having the general structure below:

[chemical structure]

[1127] wherein

[1128] R₁, R₂, R₄ and R₈ are independently selected from the group consisting of H, C₁-C₁₈ alkyl, C₂-C₁₈ alkenyl, (C₁-C₁₈ alkyl)OH, (C₁-C₁₈ alkyl)SH, (C₂-C₃ alkyl)SCH₃, (C₁-C₄ alkyl)CONH₂, (C₁-C₄ alkyl)COOH, (C₁-C₄ alkyl)NH₂, (C₁-C₄ alkyl)NHC(NH₂⁺)NH₂, (C₀-C₄ alkyl)(C₃-C₆ cycloalkyl), (C₀-C₄ alkyl)(C₂-C₅ heterocyclic), (C₀-C₄ alkyl)(C₆-C₁₀ aryl)R₇, (C₁-C₄ alkyl)(C₃-C₉ heteroaryl), and C₁-C₁₂ alkyl(W₁)C₁-C₁₂ alkyl, wherein W₁ is a heteroatom selected from the group consisting of N, S and O, or R₁ and R₂ together with the atoms to which they are attached form a C₃-C₁₂ cycloalkyl; or R₄ and R₈ together with the atoms to which they are attached form a C₃-C₆ cycloalkyl;

[1129] R₃ is selected from the group consisting of C₁-C₁₈ alkyl, (C₁-C₁₈ alkyl)OH, (C₁-C₁₈ alkyl)NH₂, (C₁-C₁₈ alkyl)SH, (C₀-C₄ alkyl)(C₃-C₆)cycloalkyl, (C₀-C₄ alkyl)(C₂-C₅ heterocyclic), (C₀-C₄ alkyl)(C₆-C₁₀ aryl)R₇, and (C₁-C₄ alkyl)(C₃-C₉ heteroaryl) or R₄ and R₃ together with the atoms to which they are attached form a 4, 5 or 6 member heterocyclic ring;

[1130] R₅ is NHR₆ or OH;

[1131] R₆ is H, C₁-C₈ alkyl or R₆ and R₁ together with the atoms to which they are attached form a 4, 5 or 6 member heterocyclic ring; and

[1132] R₇ is selected from the group consisting of hydrogen, C₁-C₁₈ alkyl, C₂-C₁₈ alkenyl, (C₀-C₄ alkyl)CONH₂, (C₀-C₄ alkyl)COOH, (C₀-C₄ alkyl)NH₂, (C₀-C₄ alkyl)OH, and halo.

[1133] In some embodiments, the dipeptide prodrug element is linked to the amino terminus of Q. In other embodiments, the dipeptide prodrug is linked to an internal amino acid of Q, as described in International Patent Application No. PCT US09/68745.

### Exemplary Embodiments of Q-L-Y

[1134] In some embodiments of the invention, the glucagon superfamily peptide conjugates can be represented by the following formula:

Q-L-Y

wherein Q is a glucagon superfamily peptide, Y is a NHR ligand, and L is a linking group or a bond.

[1135] In specific aspects, Q comprises an amino acid sequence that is based on the amino acid sequence of native human GLP-1 (SEQ ID NO.: 1603). In some aspects, Q comprises a modified amino acid sequence of SEQ ID NO: 1603 comprising 1, 2, 3, 4, 5, 6, 7, 8, 9, 10, 11, 12, 13, 14, 15, and in some instances, 16 or more (e.g., 17, 18, 19, 20, 21, 22, 23, 24, 25, etc.), amino acid modifications and up to 1, up to 2, up to 3, up to 4, up to 5, up to 6, up to 7, up to 8, up to 9, or up to 10 amino acid modifications (e.g., acylation, alkylation, pegylation, truncation at C-terminus, substitution) relative to the native human GLP-1 sequence (SEQ ID NO: 1603). For example, Q can be GLP-1 (Aib²E¹⁶CexK⁴⁰) (SEQ ID NO.: 1647), GLP-1 (Aib²A²²CexK⁴⁰) (SEQ ID NO.: 1648), dGLP-1 (A¹Aib²A²²CexK⁴⁰) (SEQ ID NO.: 1649), GLP-1 (Aib²E¹⁶C²⁴(PEG-40 kDa)CexK⁴⁰) (SEQ ID NO.: 1650).

[1136] In specific aspects, Y is a steroid or a derivative thereof, and acts at an estrogen receptor, an androgen receptor, a glucocorticoid receptor, or a RAR-related orphan receptor. In some embodiments, Y comprises a structure that permits or promotes agonist activity at an estrogen receptor, an androgen receptor, a glucocorticoid receptor, or a RAR-related orphan receptor, while in other embodiments, Y is an antagonist of an estrogen receptor, an androgen receptor, a glucocorticoid receptor, or a RAR-related orphan receptor. For example, Y can be estradiol, estrone, or cholesterol.

[1137] In specific aspects, L is stable in vivo. In some embodiments, L comprises, for example, an amide, ether, carbamate, or thioether. In alternative aspects, L is hydrolyzable in vivo. In some embodiments, L comprises an ester, anhydride, or thioester. In other aspects, L is metastable in vivo. In some aspects, L is acid-labile (e.g., comprises hydrazone moiety), reduction-labile (e.g., comprises a disulfide moiety), or enzyme-labile (e.g., comprises a cathepsin B-cleavable moiety).

[1138] Nonlimiting examples of GLP-1 based glucagon superfamily peptides conjugated to estradiol through a stable linkage are shown below (SEQ ID NOs.: 1651-1654, 1667).

[chemical structure]

[1139] Nonlimiting examples of GLP-1 based glucagon superfamily peptides conjugated to cholesterol through a stable linkage are shown below (SEQ ID NOs.: 1660-1661).

[chemical structure]

[1140] Nonlimiting examples of GLP-1 based glucagon superfamily peptides conjugated to estradiol or estrone through a hydrolyzable linkage are shown below (SEQ ID NOs.: 1655-1659, 1666).

[chemical structure]

[chemical structure]

[chemical structure]

[1141] Nonlimiting examples of GLP-1 based glucagon superfamily peptides conjugated to estradiol through an acid-labile linkage is shown below (SEQ ID NO.: 1662).

[chemical structure]

[1142] Nonlimiting examples of GLP-1 based glucagon superfamily peptides conjugated to estradiol through a reduction-labile linkage are shown below (SEQ ID NOs.: 1663-1664).

[chemical structure]

[1143] Nonlimiting examples of GLP-1 based glucagon superfamily peptides conjugated to estradiol through an enzyme-labile linkage are shown below (SEQ ID NOs.: 1665, 1668).

[chemical structure]

[1144] In some embodiments, any of SEQ ID NOs.: 1-760, 801-919, 1001-1275, 1301-1371, 1401-1518, 1601-1646 can be substituted for SEQ ID NOs.: 1647-1650 in the above exemplary embodiments.

[1145] Data herein confirms that conjugates comprising the glucagon superfamily peptides of the invention (Q) and estrogen (Y) have synergistic pharmacology. The Q portion of these conjugates can act to direct the estrogen portion of the conjugate to targets of desired action and away from classical gynecological tissues, to result in improved glycemic control and energy homeostasis, with a much enhanced therapeutic index.

[1146] Pancreatic β cell dysfunction is characterized by the loss of insulin biosynthesis and secretion in combination with a decrease in functional mass due to β cell apoptosis, which arises from chronic glucose & lipid oxidation (glucolipotoxicity) along with compensatory hyperfunction (ER stress). Because type 2 diabetes ensues upon β cell dysfunction, strategies aimed to protect insulin-producing β cells from apoptosis or to restore β cell functional mass represent a major opportunity for therapeutic intervention in the treatment of type 2 diabetes.

[1147] Estrogen possesses robust anti-apoptotic effects in rodent and human β cells, as well as other target tissues in the body. Estrogen's extra-pancreatic functions in the liver to suppress lipogenesis and restore insulin sensitivity can indirectly improve β cell function. It also has action at the hypothalamus to reduce food intake and increase energy expenditure. However, these estrogen effects can be deleterious in gynecological target tissues, as hormone replacement therapy has been shown to increase the incidence of breast cancer. Without intending to be bound by any particular theory, selectively directing estrogen action to β cells, liver, &/or hypothalamus can be beneficial.

[1148] The clinical application of estrogen has been limited due to the fear of its oncogenic potential and gynecological action. To enhance the therapeutic index of estrogen, the incretin-based conjugates of the invention permit preferential targeting of estrogen to desired tissues while minimizing action at breast and endometrial tissues. Data in the examples herein demonstrate that conjugates of glucagon superfamily peptides and estrogen have a synergistic, beneficial effect on glycemic control (e.g. as measured by decreased glucose levels) and energy homeostasis (e.g. as measured by decreased body weight and/or fat mass) by the combined insulinotropic and anabolic activities on pancreatic beta cells with an anorectic effect at the hypothalamus.

[1149] To explore the capacity of each individual component of the conjugate (e.g., the GLP-1 portion and estrogen portion) to regulate blood glucose and body weight, a set of peptide-estrogen conjugates were synthesized to possess full GLP-1 agonism with a range of less than 0.1% to more than 100% in vitro activity and with linker chemistries (stable, labile, and metastable) that enable differential estrogen release in plasma. The specific release of estrogen was determined to vary within a broad range from chemical forms that were stable to other forms that fully release estrogen in a few hours.

[1150] For example, in diet-induced obese mice, a fully active GLP-1 agonist with a stably-linked estrogen consistently proved to be more efficacious in reducing blood glucose and body weight than the comparative GLP-1 control. The stable estrogen-peptide conjugates proved to be devoid of classical estrogenic activity as assessed by the lack of uterotrophic activity in ovariectomized mice, whereas labile estrogen-peptide conjugates displayed trophic activity at the uterus. Chemical derivatives that knocked-out GLP-1 agonism and/or rendered the estrogen labile in plasma demonstrated lesser efficacy than the stable GLP-1/Estrogen conjugates, indicating the combined presence of GLP-1 and targeted estrogen can achieve superior reductions in glucose and body weight.

[1151] The “meta”-stable peptide-estrogen conjugates that were prepared are stable in plasma but capable of releasing estrogen upon cellular internalization. These glucagon superfamily peptide/estrogen conjugates with metastable linkages were able to lower glucose levels and body weight to a greater extent than conjugates with labile linkages, while lacking deleterious uterotrophic activity.

[1152] Glucagon superfamily peptides that are stably or metastably linked to estrogen consistently demonstrated an enhanced efficacy in reducing body weight, food intake, and fat mass in obese, non-diabetic mice when compared to an appropriate control. This enhanced efficacy is absent in conjugates where the estrogen is pharmacologically labile, and is not observed in conjugates where the glucagon superfamily peptide is purposefully inactive. The stable and metastable attachments of estrogen to glucagon superfamily peptides were differentially devoid of estrogenic activity relative to the labile conjugates and, in contrast to labile conjugates, did not display uterine growth. Collectively, these finding demonstrate enhanced efficacy derived from the stably- and metastably-linked glucagon superfamily peptide/estrogen conjugates of the invention in obese, metabolically compromised mice without evidence of the classical estrogenic effect that limit estrogen's medicinal use.

[1153] In exemplary embodiments, the conjugates are useful for treating any of the conditions described herein, including but not limited to a hyperglycemic medical condition, obesity, metabolic syndrome, and NAFLD.

### Pharmaceutical Compositions

### Salts

[1154] In some embodiments, the Q-L-Y conjugates described herein are in the form of a salt, e.g., a pharmaceutically acceptable salt. As used herein the term “pharmaceutically acceptable salt” refers to salts of compounds that retain the biological activity of the parent compound, and which are not biologically or otherwise undesirable. Such salts can be prepared in situ during the final isolation and purification of the conjugate, or separately prepared by reacting a free base function with a suitable acid. Many of the compounds disclosed herein are capable of forming acid and/or base salts by virtue of the presence of amino and/or carboxyl groups or groups similar thereto.

[1155] Pharmaceutically acceptable acid addition salts may be prepared from inorganic and organic acids. Representative acid addition salts include, but are not limited to acetate, adipate, alginate, citrate, aspartate, benzoate, benzenesulfonate, bisulfate, butyrate, camphorate, camphor sulfonate, digluconate, glycerophosphate, hemisulfate, heptanoate, hexanoate, fumarate, hydrochloride, hydrobromide, hydroiodide, 2-hydroxyethansulfonate (isothionate), lactate, maleate, methane sulfonate, nicotinate, 2-naphthalene sulfonate, oxalate, palmitoate, pectinate, persulfate, 3-phenylpropionate, picrate, pivalate, propionate, succinate, tartrate, thiocyanate, phosphate, glutamate, bicarbonate, p-toluenesulfonate, and undecanoate. Salts derived from inorganic acids include hydrochloric acid, hydrobromic acid, sulfuric acid, nitric acid, phosphoric acid, and the like. Salts derived from organic acids include acetic acid, propionic acid, glycolic acid, pyruvic acid, oxalic acid, malic acid, malonic acid, succinic acid, maleic acid, fumaric acid, tartaric acid, citric acid, benzoic acid, cinnamic acid, mandelic acid, methanesulfonic acid, ethanesulfonic acid, p-toluene-sulfonic acid, salicylic acid, and the like. Examples of acids which can be employed to form pharmaceutically acceptable acid addition salts include, for example, an inorganic acid, e.g., hydrochloric acid, hydrobromic acid, sulphuric acid, and phosphoric acid, and an organic acid, e.g., oxalic acid, maleic acid, succinic acid, and citric acid.

[1156] Basic addition salts also can be prepared in situ during the final isolation and purification of the source of salicylic acid, or by reacting a carboxylic acid-containing moiety with a suitable base such as the hydroxide, carbonate, or bicarbonate of a pharmaceutically acceptable metal cation or with ammonia or an organic primary, secondary, or tertiary amine. Pharmaceutically acceptable salts include, but are not limited to, cations based on alkali metals or alkaline earth metals such as lithium, sodium, potassium, calcium, magnesium, and aluminum salts, and the like, and nontoxic quaternary ammonia and amine cations including ammonium, tetramethylammonium, tetraethylammonium, methylammonium, dimethylammonium, trimethylammonium, triethylammonium, diethylammonium, and ethylammonium, amongst others. Other representative organic amines useful for the formation of base addition salts include, for example, ethylenediamine, ethanolamine, diethanolamine, piperidine, piperazine, and the like. Salts derived from organic bases include, but are not limited to, salts of primary, secondary and tertiary amines.

[1157] Further, basic nitrogen-containing groups can be quaternized with the conjugate of the present disclosure as lower alkyl halides such as methyl, ethyl, propyl, and butyl chlorides, bromides, and iodides; long chain halides such as decyl, lauryl, myristyl, and stearyl chlorides, bromides, and iodides; arylalkyl halides like benzyl and phenethyl bromides and others. Water or oil-soluble or dispersible products are thereby obtained.

### Formulations

[1158] In accordance with some embodiments, a pharmaceutical composition is provided wherein the composition comprises a Q-L-Y conjugate of the present disclosure, or pharmaceutically acceptable salt thereof, and a pharmaceutically acceptable carrier. The pharmaceutical composition can comprise any pharmaceutically acceptable ingredient, including, for example, acidifying agents, additives, adsorbents, aerosol propellants, air displacement agents, alkalizing agents, anticaking agents, anticoagulants, antimicrobial preservatives, antioxidants, antiseptics, bases, binders, buffering agents, chelating agents, coating agents, coloring agents, desiccants, detergents, diluents, disinfectants, disintegrants, dispersing agents, dissolution enhancing agents, dyes, emollients, emulsifying agents, emulsion stabilizers, fillers, film forming agents, flavor enhancers, flavoring agents, flow enhancers, gelling agents, granulating agents, humectants, lubricants, mucoadhesives, ointment bases, ointments, oleaginous vehicles, organic bases, pastille bases, pigments, plasticizers, polishing agents, preservatives, sequestering agents, skin penetrants, solubilizing agents, solvents, stabilizing agents, suppository bases, surface active agents, surfactants, suspending agents, sweetening agents, therapeutic agents, thickening agents, tonicity agents, toxicity agents, viscosity-increasing agents, water-absorbing agents, water-miscible cosolvents, water softeners, or wetting agents.

[1159] In some embodiments, the pharmaceutical composition comprises any one or a combination of the following components: acacia, acesulfame potassium, acetyltributyl citrate, acetyltriethyl citrate, agar, albumin, alcohol, dehydrated alcohol, denatured alcohol, dilute alcohol, aleuritic acid, alginic acid, aliphatic polyesters, alumina, aluminum hydroxide, aluminum stearate, amylopectin, α-amylose, ascorbic acid, ascorbyl palmitate, aspartame, bacteriostatic water for injection, bentonite, bentonite magma, benzalkonium chloride, benzethonium chloride, benzoic acid, benzyl alcohol, benzyl benzoate, bronopol, butylated hydroxyanisole, butylated hydroxytoluene, butylparaben, butylparaben sodium, calcium alginate, calcium ascorbate, calcium carbonate, calcium cyclamate, dibasic anhydrous calcium phosphate, dibasic dehydrate calcium phosphate, tribasic calcium phosphate, calcium propionate, calcium silicate, calcium sorbate, calcium stearate, calcium sulfate, calcium sulfate hemihydrate, canola oil, carbomer, carbon dioxide, carboxymethyl cellulose calcium, carboxymethyl cellulose sodium, β-carotene, carrageenan, castor oil, hydrogenated castor oil, cationic emulsifying wax, cellulose acetate, cellulose acetate phthalate, ethyl cellulose, microcrystalline cellulose, powdered cellulose, silicified microcrystalline cellulose, sodium carboxymethyl cellulose, cetostearyl alcohol, cetrimide, cetyl alcohol, chlorhexidine, chlorobutanol, chlorocresol, cholesterol, chlorhexidine acetate, chlorhexidine gluconate, chlorhexidine hydrochloride, chlorodifluoroethane (HCFC), chlorodifluoromethane, chlorofluorocarbons (CFC)chlorophenoxyethanol, chloroxylenol, corn syrup solids, anhydrous citric acid, citric acid monohydrate, cocoa butter, coloring agents, corn oil, cottonseed oil, cresol, m-cresol, o-cresol, p-cresol, croscarmellose sodium, crospovidone, cyclamic acid, cyclodextrins, dextrates, dextrin, dextrose, dextrose anhydrous, diazolidinyl urea, dibutyl phthalate, dibutyl sebacate, diethanolamine, diethyl phthalate, difluoroethane (HFC), dimethyl-β-cyclodextrin, cyclodextrin-type compounds such as Captisol®, dimethyl ether, dimethyl phthalate, dipotassium edentate, disodium edentate, disodium hydrogen phosphate, docusate calcium, docusate potassium, docusate sodium, dodecyl gallate, dodecyltrimethylammonium bromide, edentate calcium disodium, edtic acid, eglumine, ethyl alcohol, ethylcellulose, ethyl gallate, ethyl laurate, ethyl maltol, ethyl oleate, ethylparaben, ethylparaben potassium, ethylparaben sodium, ethyl vanillin, fructose, fructose liquid, fructose milled, fructose pyrogen-free, powdered fructose, fumaric acid, gelatin, glucose, liquid glucose, glyceride mixtures of saturated vegetable fatty acids, glycerin, glyceryl behenate, glyceryl monooleate, glyceryl monostearate, self-emulsifying glyceryl monostearate, glyceryl palmitostearate, glycine, glycols, glycofurol, guar gum, heptafluoropropane (HFC), hexadecyltrimethylammonium bromide, high fructose syrup, human serum albumin, hydrocarbons (HC), dilute hydrochloric acid, hydrogenated vegetable oil, type II, hydroxyethyl cellulose, 2-hydroxyethyl-β-cyclodextrin, hydroxypropyl cellulose, low-substituted hydroxypropyl cellulose, 2-hydroxypropyl-β-cyclodextrin, hydroxypropyl methylcellulose, hydroxypropyl methylcellulose phthalate, imidurea, indigo carmine, ion exchangers, iron oxides, isopropyl alcohol, isopropyl myristate, isopropyl palmitate, isotonic saline, kaolin, lactic acid, lactitol, lactose, lanolin, lanolin alcohols, anhydrous lanolin, lecithin, magnesium aluminum silicate, magnesium carbonate, normal magnesium carbonate, magnesium carbonate anhydrous, magnesium carbonate hydroxide, magnesium hydroxide, magnesium lauryl sulfate, magnesium oxide, magnesium silicate, magnesium stearate, magnesium trisilicate, magnesium trisilicate anhydrous, malic acid, malt, maltitol, maltitol solution, maltodextrin, maltol, maltose, mannitol, medium chain triglycerides, meglumine, menthol, methylcellulose, methyl methacrylate, methyl oleate, methylparaben, methylparaben potassium, methylparaben sodium, microcrystalline cellulose and carboxymethylcellulose sodium, mineral oil, light mineral oil, mineral oil and lanolin alcohols, oil, olive oil, monoethanolamine, montmorillonite, octyl gallate, oleic acid, palmitic acid, paraffin, peanut oil, petrolatum, petrolatum and lanolin alcohols, pharmaceutical glaze, phenol, liquified phenol, phenoxyethanol, phenoxypropanol, phenylethyl alcohol, phenylmercuric acetate, phenylmercuric borate, phenylmercuric nitrate, polacrilin, polacrilin potassium, poloxamer, polydextrose, polyethylene glycol, polyethylene oxide, polyacrylates, polyethylene-polyoxypropylene-block polymers, polymethacrylates, polyoxyethylene alkyl ethers, polyoxyethylene castor oil derivatives, polyoxyethylene sorbitol fatty acid esters, polyoxyethylene stearates, polyvinyl alcohol, polyvinyl pyrrolidone, potassium alginate, potassium benzoate, potassium bicarbonate, potassium bisulfite, potassium chloride, potassium citrate, potassium citrate anhydrous, potassium hydrogen phosphate, potassium metabisulfite, monobasic potassium phosphate, potassium propionate, potassium sorbate, povidone, propanol, propionic acid, propylene carbonate, propylene glycol, propylene glycol alginate, propyl gallate, propylparaben, propylparaben potassium, propylparaben sodium, protamine sulfate, rapeseed oil, Ringer's solution, saccharin, saccharin ammonium, saccharin calcium, saccharin sodium, safflower oil, saponite, serum proteins, sesame oil, colloidal silica, colloidal silicon dioxide, sodium alginate, sodium ascorbate, sodium benzoate, sodium bicarbonate, sodium bisulfite, sodium chloride, anhydrous sodium citrate, sodium citrate dehydrate, sodium chloride, sodium cyclamate, sodium edentate, sodium dodecyl sulfate, sodium lauryl sulfate, sodium metabisulfite, sodium phosphate, dibasic, sodium phosphate, monobasic, sodium phosphate, tribasic, anhydrous sodium propionate, sodium propionate, sodium sorbate, sodium starch glycolate, sodium stearyl fumarate, sodium sulfite, sorbic acid, sorbitan esters (sorbitan fatty esters), sorbitol, sorbitol solution 70%, soybean oil, spermaceti wax, starch, corn starch, potato starch, pregelatinized starch, sterilizable maize starch, stearic acid, purified stearic acid, stearyl alcohol, sucrose, sugars, compressible sugar, confectioner's sugar, sugar spheres, invert sugar, Sugartab, Sunset Yellow FCF, synthetic paraffin, talc, tartaric acid, tartrazine, tetrafluoroethane (HFC), theobroma oil, thimerosal, titanium dioxide, alpha tocopherol, tocopheryl acetate, alpha tocopheryl acid succinate, beta-tocopherol, delta-tocopherol, gamma-tocopherol, tragacanth, triacetin, tributyl citrate, triethanolamine, triethyl citrate, trimethyl-1′-cyclodextrin, trimethyltetradecylammonium bromide, tris buffer, trisodium edentate, vanillin, type I hydrogenated vegetable oil, water, soft water, hard water, carbon dioxide-free water, pyrogen-free water, water for injection, sterile water for inhalation, sterile water for injection, sterile water for irrigation, waxes, anionic emulsifying wax, carnauba wax, cationic emulsifying wax, cetyl ester wax, microcrystalline wax, nonionic emulsifying wax, suppository wax, white wax, yellow wax, white petrolatum, wool fat, xanthan gum, xylitol, zein, zinc propionate, zinc salts, zinc stearate, or any excipient in the Handbook of Pharmaceutical Excipients, Third Edition, A. H. Kibbe (Pharmaceutical Press, London, UK, 2000), which is incorporated by reference in its entirety. Remington's Pharmaceutical Sciences, Sixteenth Edition, E. W. Martin (Mack Publishing Co., Easton, Pa., 1980), which is incorporated by reference in its entirety, discloses various components used in formulating pharmaceutically acceptable compositions and known techniques for the preparation thereof. Except insofar as any conventional agent is incompatible with the pharmaceutical compositions, its use in pharmaceutical compositions is contemplated. Supplementary active ingredients also can be incorporated into the compositions.

[1160] In some embodiments, the foregoing component(s) may be present in the pharmaceutical composition at any concentration, such as, for example, at least A, wherein A is 0.0001% w/v, 0.001% w/v, 0.01% w/v, 0.1% w/v, 1% w/v, 2% w/v, 5% w/v, 10% w/v, 20% w/v, 30% w/v, 40% w/v, 50% w/v, 60% w/v, 70% w/v, 80% w/v, or 90% w/v. In some embodiments, the foregoing component(s) may be present in the pharmaceutical composition at any concentration, such as, for example, at most B, wherein B is 90% w/v, 80% w/v, 70% w/v, 60% w/v, 50% w/v, 40% w/v, 30% w/v, 20% w/v, 10% w/v, 5% w/v, 2% w/v, 1% w/v, 0.1% w/v, 0.001% w/v, or 0.0001%. In other embodiments, the foregoing component(s) may be present in the pharmaceutical composition at any concentration range, such as, for example from about A to about B. In some embodiments, A is 0.0001% and B is 90%.

[1161] The pharmaceutical compositions may be formulated to achieve a physiologically compatible pH. In some embodiments, the pH of the pharmaceutical composition may be at least 5, at least 5.5, at least 6, at least 6.5, at least 7, at least 7.5, at least 8, at least 8.5, at least 9, at least 9.5, at least 10, or at least 10.5 up to and including pH 11, depending on the formulation and route of administration. In certain embodiments, the pharmaceutical compositions may comprise buffering agents to achieve a physiological compatible pH. The buffering agents may include any compounds capable of buffering at the desired pH such as, for example, phosphate buffers (e.g., PBS), triethanolamine, Tris, bicine, TAPS, tricine, HEPES, TES, MOPS, PIPES, cacodylate, MES, and others. In certain embodiments, the strength of the buffer is at least 0.5 mM, at least 1 mM, at least 5 mM, at least 10 mM, at least 20 mM, at least 30 mM, at least 40 mM, at least 50 mM, at least 60 mM, at least 70 mM, at least 80 mM, at least 90 mM, at least 100 mM, at least 120 mM, at least 150 mM, or at least 200 mM. In some embodiments, the strength of the buffer is no more than 300 mM (e.g., at most 200 mM, at most 100 mM, at most 90 mM, at most 80 mM, at most 70 mM, at most 60 mM, at most 50 mM, at most 40 mM, at most 30 mM, at most 20 mM, at most 10 mM, at most 5 mM, at most 1 mM).

### Routes of Administration

[1162] The following discussion on routes of administration is merely provided to illustrate exemplary embodiments and should not be construed as limiting the scope in any way.

[1163] Formulations suitable for oral administration can consist of (a) liquid solutions, such as an effective amount of the conjugate of the present disclosure dissolved in diluents, such as water, saline, or orange juice; (b) capsules, sachets, tablets, lozenges, and troches, each containing a predetermined amount of the active ingredient, as solids or granules; (c) powders; (d) suspensions in an appropriate liquid; and (e) suitable emulsions. Liquid formulations may include diluents, such as water and alcohols, for example, ethanol, benzyl alcohol, and the polyethylene alcohols, either with or without the addition of a pharmaceutically acceptable surfactant. Capsule forms can be of the ordinary hard- or soft-shelled gelatin type containing, for example, surfactants, lubricants, and inert fillers, such as lactose, sucrose, calcium phosphate, and corn starch. Tablet forms can include one or more of lactose, sucrose, mannitol, corn starch, potato starch, alginic acid, microcrystalline cellulose, acacia, gelatin, guar gum, colloidal silicon dioxide, croscarmellose sodium, talc, magnesium stearate, calcium stearate, zinc stearate, stearic acid, and other excipients, colorants, diluents, buffering agents, disintegrating agents, moistening agents, preservatives, flavoring agents, and other pharmacologically compatible excipients. Lozenge forms can comprise the conjugate of the present disclosure in a flavor, usually sucrose and acacia or tragacanth, as well as pastilles comprising the conjugate of the present disclosure in an inert base, such as gelatin and glycerin, or sucrose and acacia, emulsions, gels, and the like containing, in addition to, such excipients as are known in the art.

[1164] The conjugates of the disclosure, alone or in combination with other suitable components, can be delivered via pulmonary administration and can be made into aerosol formulations to be administered via inhalation. These aerosol formulations can be placed into pressurized acceptable propellants, such as dichlorodifluoromethane, propane, nitrogen, and the like. They also may be formulated as pharmaceuticals for non-pressured preparations, such as in a nebulizer or an atomizer. Such spray formulations also may be used to spray mucosa. In some embodiments, the conjugate is formulated into a powder blend or into microparticles or nanoparticles. Suitable pulmonary formulations are known in the art. See, e.g., Qian et al., Int J Pharm 366: 218-220 (2009); Adjei and Garren, Pharmaceutical Research, 7(6): 565-569 (1990); Kawashima et al., J Controlled Release 62(1-2): 279-287 (1999); Liu et al., Pharm Res 10(2): 228-232 (1993); International Patent Application Publication Nos. WO 2007/133747 and WO 2007/141411.

[1165] Formulations suitable for parenteral administration include aqueous and non-aqueous, isotonic sterile injection solutions, which can contain anti-oxidants, buffers, bacteriostats, and solutes that render the formulation isotonic with the blood of the intended recipient, and aqueous and non-aqueous sterile suspensions that can include suspending agents, solubilizers, thickening agents, stabilizers, and preservatives. The term, “parenteral” means not through the alimentary canal but by some other route such as subcutaneous, intramuscular, intraspinal, or intravenous. The conjugate of the present disclosure can be administered with a physiologically acceptable diluent in a pharmaceutical carrier, such as a sterile liquid or mixture of liquids, including water, saline, aqueous dextrose and related sugar solutions, an alcohol, such as ethanol or hexadecyl alcohol, a glycol, such as propylene glycol or polyethylene glycol, dimethylsulfoxide, glycerol, ketals such as 2,2-dimethyl-153-dioxolane-4-methanol, ethers, poly(ethyleneglycol) 400, oils, fatty acids, fatty acid esters or glycerides, or acetylated fatty acid glycerides with or without the addition of a pharmaceutically acceptable surfactant, such as a soap or a detergent, suspending agent, such as pectin, carbomers, methylcellulose, hydroxypropylmethylcellulose, or carboxymethylcellulose, or emulsifying agents and other pharmaceutical adjuvants.

[1166] Oils, which can be used in parenteral formulations include petroleum, animal, vegetable, or synthetic oils. Specific examples of oils include peanut, soybean, sesame, cottonseed, corn, olive, petrolatum, and mineral. Suitable fatty acids for use in parenteral formulations include oleic acid, stearic acid, and isostearic acid. Ethyl oleate and isopropyl myristate are examples of suitable fatty acid esters.

[1167] Suitable soaps for use in parenteral formulations include fatty alkali metal, ammonium, and triethanolamine salts, and suitable detergents include (a) cationic detergents such as, for example, dimethyl dialkyl ammonium halides, and alkyl pyridinium halides, (b) anionic detergents such as, for example, alkyl, aryl, and olefin sulfonates, alkyl, olefin, ether, and monoglyceride sulfates, and sulfosuccinates, (c) nonionic detergents such as, for example, fatty amine oxides, fatty acid alkanolamides, and polyoxyethylenepolypropylene copolymers, (d) amphoteric detergents such as, for example, alkyl-1′-aminopropionates, and 2-alkyl-imidazoline quaternary ammonium salts, and (e) mixtures thereof.

[1168] The parenteral formulations will typically contain from about 0.5% to about 25% by weight of Q-L-Y conjugate of the present disclosure in solution. Preservatives and buffers may be used. In order to minimize or eliminate irritation at the site of injection, such compositions may contain one or more nonionic surfactants having a hydrophile-lipophile balance (HLB) of from about 12 to about 17. The quantity of surfactant in such formulations will typically range from about 5% to about 15% by weight. Suitable surfactants include polyethylene glycol sorbitan fatty acid esters, such as sorbitan monooleate and the high molecular weight adducts of ethylene oxide with a hydrophobic base, formed by the condensation of propylene oxide with propylene glycol. The parenteral formulations can be presented in unit-dose or multi-dose sealed containers, such as ampoules and vials, and can be stored in a freeze-dried (lyophilized) condition requiring only the addition of the sterile liquid excipient, for example, water, for injections, immediately prior to use. Extemporaneous injection solutions and suspensions can be prepared from sterile powders, granules, and tablets of the kind previously described.

[1169] Injectable formulations are in accordance with the invention. The requirements for effective pharmaceutical carriers for injectable compositions are well-known to those of ordinary skill in the art (see, e.g., Pharmaceutics and Pharmacy Practice, J. B. Lippincott Company, Philadelphia, Pa., Banker and Chalmers, eds., pages 238-250 (1982), and ASHP Handbook on Injectable Drugs, Toissel, 4th ed., pages 622-630 (1986)).

[1170] Additionally, the conjugate of the present disclosures can be made into suppositories for rectal administration by mixing with a variety of bases, such as emulsifying bases or water-soluble bases. Formulations suitable for vaginal administration can be presented as pessaries, tampons, creams, gels, pastes, foams, or spray formulas containing, in addition to the active ingredient, such carriers as are known in the art to be appropriate.

[1171] It will be appreciated by one of skill in the art that, in addition to the above-described pharmaceutical compositions, the conjugate of the disclosure can be formulated as inclusion complexes, such as cyclodextrin inclusion complexes, or liposomes.

### Dose

[1172] The Q-L-Y conjugates of the disclosure are believed to be useful in methods of treating a disease or medical condition in which glucagon receptor agonism, GLP-1 receptor agonism, GIP receptor agonism, glucagon receptor/GLP-1 receptor co-agonism, glucagon receptor/GIP receptor co-agonism, GLP-1 receptor/GIP receptor co-agonism or glucagon receptor/GLP-1 receptor/GIP receptor tri-agonism plays a role. For purposes of the disclosure, the amount or dose of the conjugate of the present disclosure administered should be sufficient to effect, e.g., a therapeutic or prophylactic response, in the subject or animal over a reasonable time frame. For example, the dose of the conjugate of the present disclosure should be sufficient to stimulate cAMP secretion from cells as described herein or sufficient to decrease blood glucose levels, fat levels, food intake levels, or body weight of a mammal, in a period of from about 1 to 4 minutes, 1 to 4 hours or 1 to 4 weeks or longer, e.g., 5 to 20 or more weeks, from the time of administration. In certain embodiments, the time period could be even longer. The dose will be determined by the efficacy of the particular conjugate of the present disclosure and the condition of the animal (e.g., human), as well as the body weight of the animal (e.g., human) to be treated.

[1173] Many assays for determining an administered dose are known in the art. For purposes herein, an assay, which comprises comparing the extent to which blood glucose levels are lowered upon administration of a given dose of the conjugate of the present disclosure to a mammal among a set of mammals of which is each given a different dose of the conjugate, could be used to determine a starting dose to be administered to a mammal. The extent to which blood glucose levels are lowered upon administration of a certain dose can be assayed by methods known in the art, including, for instance, the methods described herein in the Examples section.

[1174] The dose of the conjugate of the present disclosure also will be determined by the existence, nature and extent of any adverse side effects that might accompany the administration of a particular conjugate of the present disclosure. Typically, the attending physician will decide the dosage of the conjugate of the present disclosure with which to treat each individual patient, taking into consideration a variety of factors, such as age, body weight, general health, diet, sex, conjugate of the present disclosure to be administered, route of administration, and the severity of the condition being treated. By way of example and not intending to limit the invention, the dose of the conjugate of the present disclosure can be about 0.0001 to about 1 g/kg body weight of the subject being treated/day, from about 0.0001 to about 0.001 g/kg body weight/day, or about 0.01 mg to about 1 g/kg body weight/day.

[1175] In some embodiments, the pharmaceutical composition comprises any of the conjugates disclosed herein at a purity level suitable for administration to a patient. In some embodiments, the conjugate has a purity level of at least about 90%, about 91%, about 92%, about 93%, about 94%, about 95%, about 96%, about 97%, about 98% or about 99%, and a pharmaceutically acceptable diluent, carrier or excipient. The pharmaceutical composition in some aspects comprise the conjugate of the present disclosure at a concentration of at least A, wherein A is about 0.001 mg/ml, about 0.01 mg/ml, 0 about 1 mg/ml, about 0.5 mg/ml, about 1 mg/ml, about 2 mg/ml, about 3 mg/ml, about 4 mg/ml, about 5 mg/ml, about 6 mg/ml, about 7 mg/ml, about 8 mg/ml, about 9 mg/ml, about 10 mg/ml, about 11 mg/ml, about 12 mg/ml, about 13 mg/ml, about 14 mg/ml, about 15 mg/ml, about 16 mg/ml, about 17 mg/ml, about 18 mg/ml, about 19 mg/ml, about 20 mg/ml, about 21 mg/ml, about 22 mg/ml, about 23 mg/ml, about 24 mg/ml, about 25 mg/ml or higher. In some embodiments, the pharmaceutical composition comprises the conjugate at a concentration of at most B, wherein B is about 30 mg/ml, about 25 mg/ml, about 24 mg/ml, about 23, mg/ml, about 22 mg/ml, about 21 mg/ml, about 20 mg/ml, about 19 mg/ml, about 18 mg/ml, about 17 mg/ml, about 16 mg/ml, about 15 mg/ml, about 14 mg/ml, about 13 mg/ml, about 12 mg/ml, about 11 mg/ml, about 10 mg/ml, about 9 mg/ml, about 8 mg/ml, about 7 mg/ml, about 6 mg/ml, about 5 mg/ml, about 4 mg/ml, about 3 mg/ml, about 2 mg/ml, about 1 mg/ml, or about 0.1 mg/ml. In some embodiments, the compositions may contain an conjugate at a concentration range of A to B mg/ml, for example, about 0.001 to about 30.0 mg/ml.

### Targeted Forms

[1176] One of ordinary skill in the art will readily appreciate that the Q-L-Y conjugates of the disclosure can be modified in any number of ways, such that the therapeutic or prophylactic efficacy of the conjugate of the present disclosures is increased through the modification. For instance, the conjugate of the present disclosure can be further conjugated either directly or indirectly through a linker to a targeting moiety. The practice of conjugating compounds, e.g., glucagon conjugates described herein, to targeting moieties is known in the art. See, for instance, Wadhwa et al., J Drug Targeting, 3, 111-127 (1995) and U.S. Pat. No. 5,087,616. The term “targeting moiety” as used herein, refers to any molecule or agent that specifically recognizes and binds to a cell-surface receptor, such that the targeting moiety directs the delivery of the conjugate of the present disclosures to a population of cells on which surface the receptor (the glucagon receptor, the GLP-1 receptor) is expressed. Targeting moieties include, but are not limited to, antibodies, or fragments thereof, peptides, hormones, growth factors, cytokines, and any other natural or non-natural ligands, which bind to cell surface receptors (e.g., Epithelial Growth Factor Receptor (EGFR), T-cell receptor (TCR), B-cell receptor (BCR), CD28, Platelet-derived Growth Factor Receptor (PDGF), nicotinic acetylcholine receptor (nAChR), etc.). As used herein a “linker” is a bond, molecule or group of molecules that binds two separate entities to one another. Linkers may provide for optimal spacing of the two entities or may further supply a labile linkage that allows the two entities to be separated from each other. Labile linkages include photocleavable groups, acid-labile moieties, base-labile moieties, hydrolyzable groups, and enzyme-cleavable groups. The term “linker” in some embodiments refers to any agent or molecule that bridges the conjugate of the present disclosures to the targeting moiety. One of ordinary skill in the art recognizes that sites on the conjugate of the present disclosures, which are not necessary for the function of the conjugate of the present disclosures, are ideal sites for attaching a linker and/or a targeting moiety, provided that the linker and/or targeting moiety, once attached to the conjugate of the present disclosures, do(es) not interfere with the function of the conjugate of the present disclosures, i.e., the ability to stimulate cAMP secretion from cells, to treat diabetes or obesity. One of ordinary skill in the art recognizes that sites on the peptide of the present disclosures (Q), which are not necessary for the function of the peptide of the present disclosures (e.g., glucagon agonist peptide, glucagon antagonist peptide, GLP-1 agonist peptide, GIP agonist peptide, or a combination of any of the foregoing), are ideal sites for attaching a linker and/or a targeting moiety, provided that the linker and/or targeting moiety, once attached to the peptide of the present disclosures (Q), does not interfere with the function of the peptide of the present disclosures.

### Controlled Release Formulations

[1177] Alternatively, the glucagon conjugates described herein can be modified into a depot form, such that the manner in which the conjugate of the present disclosures is released into the body to which it is administered is controlled with respect to time and location within the body (see, for example, U.S. Pat. No. 4,450,150). Depot forms of conjugate of the present disclosures can be, for example, an implantable composition comprising the conjugate of the present disclosures and a porous or non-porous material, such as a polymer, wherein the conjugate of the present disclosures is encapsulated by or diffused throughout the material and/or degradation of the non-porous material. The depot is then implanted into the desired location within the body and the conjugate of the present disclosures are released from the implant at a predetermined rate.

[1178] The pharmaceutical composition in certain aspects is modified to have any type of in vivo release profile. In some aspects, the pharmaceutical composition is an immediate release, controlled release, sustained release, extended release, delayed release, or bi-phasic release formulation. Methods of formulating peptides or conjugates for controlled release are known in the art. See, for example, Qian et al., J Pharm 374: 46-52 (2009) and International Patent Application Publication Nos. WO 2008/130158, WO2004/033036; WO2000/032218; and WO 1999/040942.

[1179] The instant compositions may further comprise, for example, micelles or liposomes, or some other encapsulated form, or may be administered in an extended release form to provide a prolonged storage and/or delivery effect. The disclosed pharmaceutical formulations may be administered according to any regime including, for example, daily (1 time per day, 2 times per day, 3 times per day, 4 times per day, 5 times per day, 6 times per day), every two days, every three days, every four days, every five days, every six days, weekly, bi-weekly, every three weeks, monthly, or bi-monthly.

### Uses

[1180] Based on the information provided for the first time herein, it is contemplated that the Q-L-Y conjugates described herein and related pharmaceutical compositions are useful for treatment of a disease or medical condition, in which e.g., the lack of activity at the glucagon receptor, the GLP-1 receptor, the GIP receptor or a combination of any of the foregoing, is a factor in the onset and/or progression of the disease or medical condition. Accordingly, the invention provides a method of treating or preventing a disease or medical condition in a patient, wherein the disease or medical condition is a disease of medical condition in which a lack of GLP-1 receptor activation and/or glucagon receptor activation and/or GIP activation is associated with the onset and/or progression of the disease of medical condition. The method comprises providing to the patient an conjugate in accordance with any of those described herein in an amount effective to treat or prevent the disease or medical condition.

[1181] In some embodiments, the disease or medical condition is metabolic syndrome. Metabolic Syndrome, also known as metabolic syndrome X, insulin resistance syndrome or Reaven's syndrome, is a disorder that affects over 50 million Americans. Metabolic Syndrome is typically characterized by a clustering of at least three or more of the following risk factors: (1) abdominal obesity (excessive fat tissue in and around the abdomen), (2) atherogenic dyslipidemia (blood fat disorders including high triglycerides, low HDL cholesterol and high LDL cholesterol that enhance the accumulation of plaque in the artery walls), (3) elevated blood pressure, (4) insulin resistance or glucose intolerance, (5) prothrombotic state (e.g., high fibrinogen or plasminogen activator inhibitor-1 in blood), and (6) pro-inflammatory state (e.g., elevated C-reactive protein in blood). Other risk factors may include aging, hormonal imbalance and genetic predisposition.

[1182] Metabolic Syndrome is associated with an increased the risk of coronary heart disease and other disorders related to the accumulation of vascular plaque, such as stroke and peripheral vascular disease, referred to as atherosclerotic cardiovascular disease (ASCVD). Patients with Metabolic Syndrome may progress from an insulin resistant state in its early stages to full blown type II diabetes with further increasing risk of ASCVD. Without intending to be bound by any particular theory, the relationship between insulin resistance, Metabolic Syndrome and vascular disease may involve one or more concurrent pathogenic mechanisms including impaired insulin-stimulated vasodilation, insulin resistance-associated reduction in NO availability due to enhanced oxidative stress, and abnormalities in adipocyte-derived hormones such as adiponectin (Lteif and Mather, Can. J. Cardiol. 20 (suppl. B):66B-76B (2004)).

[1183] According to the 2001 National Cholesterol Education Program Adult Treatment Panel (ATP III), any three of the following traits in the same individual meet the criteria for Metabolic Syndrome: (a) abdominal obesity (a waist circumference over 102 cm in men and over 88 cm in women); (b) serum triglycerides (150 mg/dl or above); (c) HDL cholesterol (40 mg/dl or lower in men and 50 mg/dl or lower in women); (d) blood pressure (130/85 or more); and (e) fasting blood glucose (110 mg/dl or above). According to the World Health Organization (WHO), an individual having high insulin levels (an elevated fasting blood glucose or an elevated post meal glucose alone) with at least two of the following criteria meets the criteria for Metabolic Syndrome: (a) abdominal obesity (waist to hip ratio of greater than 0.9, a body mass index of at least 30 kg/m2, or a waist measurement over 37 inches); (b) cholesterol panel showing a triglyceride level of at least 150 mg/dl or an HDL cholesterol lower than 35 mg/dl; (c) blood pressure of 140/90 or more, or on treatment for high blood pressure). (Mathur, Ruchi, “Metabolic Syndrome,” ed. Shiel, Jr., William C., MedicineNet.com, May 11, 2009).

[1184] For purposes herein, if an individual meets the criteria of either or both of the criteria set forth by the 2001 National Cholesterol Education Program Adult Treatment Panel or the WHO, that individual is considered as afflicted with Metabolic Syndrome.

[1185] Without being bound to any particular theory, Q-L-Y conjugates described herein are useful for treating Metabolic Syndrome. Accordingly, the invention provides a method of preventing or treating Metabolic Syndrome, or reducing one, two, three or more risk factors thereof, in a subject, comprising providing to the subject a conjugate described herein in an amount effective to prevent or treat Metabolic Syndrome, or the risk factor thereof.

[1186] In some embodiments, the method treats a hyperglycemic medical condition. In certain aspects, the hyperglycemic medical condition is diabetes, diabetes mellitus type I, diabetes mellitus type II, or gestational diabetes, either insulin-dependent or non-insulin-dependent. In some aspects, the method treats the hyperglycemic medical condition by reducing one or more complications of diabetes including nephropathy, retinopathy and vascular disease.

[1187] In some aspects, the disease or medical condition is obesity. In some aspects, the obesity is drug-induced obesity. In some aspects, the method treats obesity by preventing or reducing weight gain or increasing weight loss in the patient. In some aspects, the method treats obesity by reducing appetite, decreasing food intake, lowering the levels of fat in the patient, or decreasing the rate of movement of food through the gastrointestinal system.

[1188] Because obesity is associated with the onset or progression of other diseases, the methods of treating obesity are further useful in methods of reducing complications associated with obesity including vascular disease (coronary artery disease, stroke, peripheral vascular disease, ischemia reperfusion, etc.), hypertension, onset of diabetes type II, hyperlipidemia and musculoskeletal diseases. The invention accordingly provides methods of treating or preventing these obesity-associated complications.

[1189] In some embodiments, the disease or medical condition is Nonalcoholic fatty liver disease (NAFLD). NAFLD refers to a wide spectrum of liver disease ranging from simple fatty liver (steatosis), to nonalcoholic steatohepatitis (NASH), to cirrhosis (irreversible, advanced scarring of the liver). All of the stages of NAFLD have in common the accumulation of fat (fatty infiltration) in the liver cells (hepatocytes). Simple fatty liver is the abnormal accumulation of a certain type of fat, triglyceride, in the liver cells with no inflammation or scarring. In NASH, the fat accumulation is associated with varying degrees of inflammation (hepatitis) and scarring (fibrosis) of the liver. The inflammatory cells can destroy the liver cells (hepatocellular necrosis). In the terms “steatohepatitis” and “steatonecrosis”, steato refers to fatty infiltration, hepatitis refers to inflammation in the liver, and necrosis refers to destroyed liver cells. NASH can ultimately lead to scarring of the liver (fibrosis) and then irreversible, advanced scarring (cirrhosis). Cirrhosis that is caused by NASH is the last and most severe stage in the NAFLD spectrum. (Mendler, Michel, “Fatty Liver: Nonalcoholic Fatty Liver Disease (NAFLD) and Nonalcoholic Steatohepatitis (NASH),” ed. Schoenfield, Leslie J., MedicineNet.com, Aug. 29, 2005).

[1190] Alcoholic Liver Disease, or Alcohol-Induced Liver Disease, encompasses three pathologically distinct liver diseases related to or caused by the excessive consumption of alcohol: fatty liver (steatosis), chronic or acute hepatitis, and cirrhosis. Alcoholic hepatitis can range from a mild hepatitis, with abnormal laboratory tests being the only indication of disease, to severe liver dysfunction with complications such as jaundice (yellow skin caused by bilirubin retention), hepatic encephalopathy (neurological dysfunction caused by liver failure), ascites (fluid accumulation in the abdomen), bleeding esophageal varices (varicose veins in the esophagus), abnormal blood clotting and coma. Histologically, alcoholic hepatitis has a characteristic appearance with ballooning degeneration of hepatocytes, inflammation with neutrophils and sometimes Mallory bodies (abnormal aggregations of cellular intermediate filament proteins). Cirrhosis is characterized anatomically by widespread nodules in the liver combined with fibrosis. (Worman, Howard J., “Alcoholic Liver Disease”, Columbia University Medical Center website).

[1191] Without being bound to any particular theory, the Q-L-Y conjugates described herein are useful for the treatment of Alcoholic Liver Disease, NAFLD, or any stage thereof, including, for example, steatosis, steatohepatitis, hepatitis, hepatic inflammation, NASH, cirrhosis, or complications thereof. Accordingly, the invention provides a method of preventing or treating Alcoholic Liver Disease, NAFLD, or any stage thereof, in a subject comprising providing to a subject a conjugate described herein in an amount effective to prevent or treat Alcoholic Liver Disease, NAFLD, or the stage thereof. Such treatment methods include reduction in one, two, three or more of the following: liver fat content, incidence or progression of cirrhosis, incidence of hepatocellular carcinoma, signs of inflammation, e.g., abnormal hepatic enzyme levels (e.g., aspartate aminotransferase AST and/or alanine aminotransferase ALT, or LDH), elevated serum ferritin, elevated serum bilirubin, and/or signs of fibrosis, e.g., elevated TGF-beta levels. In preferred embodiments, the Q-L-Y conjugates described herein are used treat patients who have progressed beyond simple fatty liver (steatosis) and exhibit signs of inflammation or hepatitis. Such methods may result, for example, in reduction of AST and/or ALT levels.

[1192] GLP-1 and exendin-4 have been shown to have some neuroprotective effect. The invention also provides uses of the Q-L-Y conjugates described herein in treating neurodegenerative diseases, including but not limited to Alzheimer's disease, Parkinson's disease, Multiple Sclerosis, Amylotrophic Lateral Sclerosis, other demyelination related disorders, senile dementia, subcortical dementia, arteriosclerotic dementia, AIDS-associated dementia, or other dementias, a central nervous system cancer, traumatic brain injury, spinal cord injury, stroke or cerebral ischemia, cerebral vasculitis, epilepsy, Huntington's disease, Tourette's syndrome, Guillain Barre syndrome, Wilson disease, Pick's disease, neuroinflammatory disorders, encephalitis, encephalomyelitis or meningitis of viral, fungal or bacterial origin, or other central nervous system infections, prion diseases, cerebellar ataxias, cerebellar degeneration, spinocerebellar degeneration syndromes, Friedreichs ataxia, ataxia telangiectasia, spinal dysmyotrophy, progressive supranuclear palsy, dystonia, muscle spasticity, tremor, retinitis pigmentosa, striatonigral degeneration, mitochondrial encephalo-myopathies, neuronal ceroid lipofuscinosis, hepatic encephalopathies, renal encephalopathies, metabolic encephalopathies, toxin-induced encephalopathies, and radiation-induced brain damage.

[1193] In some embodiments, the disease or medical condition is hypoglycemia. In some embodiments, the patient is a diabetic patient and the hypoglycemia is induced by the administration of insulin. In specific aspects, the method comprises providing the conjugate of the present disclosure in combination with insulin so that the conjugate buffers the hypoglycemic effects of the bolus administration of insulin.

[1194] In some embodiments, the Q-L-Y conjugates are used in conjunction with parenteral administration of nutrients to non-diabetic patients in a hospital setting, e.g., to patients receiving parenteral nutrition or total parenteral nutrition. Nonlimiting examples include surgery patients, patients in comas, patients with digestive tract illness, or a nonfunctional gastrointestinal tract (e.g. due to surgical removal, blockage or impaired absorptive capacity, Crohn's disease, ulcerative colitis, gastrointestinal tract obstruction, gastrointestinal tract fistula, acute pancreatitis, ischemic bowel, major gastrointestinal surgery, certain congenital gastrointestinal tract anomalies, prolonged diarrhea, or short bowel syndrome due to surgery, patients in shock, and patients undergoing healing processes often receive parenteral administration of carbohydrates along with various combinations of lipids, electrolytes, minerals, vitamins and amino acids. The Q-L-Y conjugates and the parenteral nutrition composition can be administered at the same time, at different times, before, or after each other, provided that the Q-L-Y conjugate is exerting the desired biological effect at the time that the parenteral nutrition composition is being digested. For example, the parenteral nutrition may be administered, 1, 2 or 3 times per day, while the glucagon conjugate is administered once every other day, three times a week, two times a week, once a week, once every 2 weeks, once every 3 weeks, or once a month.

[1195] As used herein, the terms “treat,” and “prevent” as well as words stemming therefrom, do not necessarily imply 100% or complete treatment or prevention. Rather, there are varying degrees of treatment or prevention of which one of ordinary skill hi the art recognizes as having a potential benefit or therapeutic effect. In this respect, the inventive methods can provide any amount of any level of treatment or prevention of a disease or medical condition in a mammal. Furthermore, the treatment or prevention provided by the method can include treatment or prevention of one or more conditions or symptoms of the disease or medical condition. For example, with regard to methods of treating obesity, the method in some embodiments, achieves a decrease in food intake by or fat levels in a patient. Also, for purposes herein, “prevention” can encompass delaying the onset of the disease, or a symptom or condition thereof.

[1196] With regard to the above methods of treatment, the patient is any host. In some embodiments, the host is a mammal. As used herein, the term “mammal” refers to any vertebrate animal of the mammalia class, including, but not limited to, any of the monotreme, marsupial, and placental taxas. In some embodiments, the mammal is one of the mammals of the order Rodentia, such as mice and hamsters, and mammals of the order Logomorpha, such as rabbits. In certain embodiments, the mammals are from the order Carnivora, including Felines (cats) and Canines (dogs). In certain embodiments, the mammals are from the order Artiodactyla, including Bovines (cows) and S wines (pigs) or of the order Perssodactyla, including Equines (horses). In some instances, the mammals are of the order Primates, Ceboids, or Simoids (monkeys) or of the order Anthropoids (humans and apes). In particular embodiments, the mammal is a human.

### Combinations

[1197] The Q-L-Y conjugates described herein may be administered alone or in combination with other therapeutic agents which aim to treat or prevent any of the diseases or medical conditions described herein. For example, the Q-L-Y conjugates described herein may be co-administered with (simultaneously or sequentially) an anti-diabetic or anti-obesity agent. Anti-diabetic agents known in the art or under investigation include insulin, leptin, Peptide YY (PYY), Pancreatic Peptide (PP), fibroblast growth factor 21 (FGF21), Y2Y4 receptor agonists, sulfonylureas, such as tolbutamide (Orinase), acetohexamide (Dymelor), tolazamide (Tolinase), chlorpropamide (Diabinese), glipizide (Glucotrol), glyburide (Diabeta, Micronase, Glynase), glimepiride (Amaryl), or gliclazide (Diamicron); meglitinides, such as repaglinide (Prandin) or nateglinide (Starlix); biguanides such as metformin (Glucophage) or phenformin; thiazolidinediones such as rosiglitazone (Avandia), pioglitazone (Actos), or troglitazone (Rezulin), or other PPARγ inhibitors; alpha glucosidase inhibitors that inhibit carbohydrate digestion, such as miglitol (Glyset), acarbose (Precose/Glucobay); exenatide (Byetta) or pramlintide; Dipeptidyl peptidase-4 (DPP-4) inhibitors such as vildagliptin or sitagliptin; SGLT (sodium-dependent glucose transporter 1) inhibitors; glucokinase activators (GKA); glucagon receptor antagonists (GRA); or FBPase (fructose 1,6-bisphosphatase) inhibitors.

[1198] Anti-obesity agents known in the art or under investigation include appetite suppressants, including phenethylamine type stimulants, phentermine (optionally with fenfluramine or dexfenfluramine), diethylpropion (Tenuate®), phendimetrazine (Prelu-2®), Bontril®), benzphetamine (Didrex®), sibutramine (Meridia®, Reductil®); rimonabant (Acomplia®), other cannabinoid receptor antagonists; oxyntomodulin; fluoxetine hydrochloride (Prozac); Qnexa (topiramate and phentermine), Excalia (bupropion and zonisamide) or Contrave (bupropion and naltrexone); or lipase inhibitors, similar to XENICAL (Orlistat) or Cetilistat (also known as ATL-962), or GT 389-255.

[1199] The Q-L-Y conjugates described herein in some embodiments are co-administered with an agent for treatment of non-alcoholic fatty liver disease or NASH. Agents used to treat non-alcoholic fatty liver disease include ursodeoxycholic acid (a.k.a., Actigall, URSO, and Ursodiol), Metformin (Glucophage), rosiglitazone (Avandia), Clofibrate, Gemfibrozil, Polymixin B, and Betaine.

[1200] The Q-L-Y conjugates described herein in some embodiments are co-administered with an agent for treatment of a neurodegenerative disease, e.g., Parkinson's Disease. Anti-Parkinson's Disease agents are furthermore known in the art and include, but not limited to, levodopa, carbidopa, anticholinergics, bromocriptine, pramipexole, and ropinirole, amantadine, and rasagiline.

[1201] In view of the foregoing, the invention further provides pharmaceutical compositions and kits additionally comprising one of these other therapeutic agents. The additional therapeutic agent may be administered simultaneously or sequentially with the conjugate of the present disclosure. In some aspects, the conjugate is administered before the additional therapeutic agent, while in other aspects, the conjugate is administered after the additional therapeutic agent.

### Kits

[1202] The Q-L-Y conjugates of the present disclosure can be provided in accordance with one embodiment as part of a kit. Accordingly, in some embodiments, a kit for administering a Q-L-Y conjugate to a patient in need thereof is provided wherein the kit comprises a Q-L-Y conjugate as described herein.

[1203] In one embodiment the kit is provided with a device for administering the Q-L-Y conjugate composition to a patient, e.g. syringe needle, pen device, jet injector or other needle-free injector. The kit may alternatively or in addition include one or more containers, e.g., vials, tubes, bottles, single or multi-chambered pre-filled syringes, cartridges, infusion pumps (external or implantable), jet injectors, pre-filled pen devices and the like, optionally containing the glucagon conjugate in a lyophilized form or in an aqueous solution. The kits in some embodiments comprise instructions for use. In accordance with one embodiment the device of the kit is an aerosol dispensing device, wherein the composition is prepackaged within the aerosol device. In another embodiment the kit comprises a syringe and a needle, and in one embodiment the sterile glucagon composition is prepackaged within the syringe.

[1204] The following examples are given merely to illustrate the present invention and not in any way to limit its scope.

### EXAMPLES

### Example 1

### Synthesis of Peptide Fragments of Glucagon Superfamily Peptides

### Materials

[1205] All peptides described herein were amidated unless specified otherwise. MBHA (4-methylbenzhydrylamine polystyrene) resin was used during peptide synthesis. MBHA resin, 100-180 mesh, 1% divinylbenzene (DVB) cross-linked polystyrene; loading of 0.7-1.0 mmol/g), Boc-protected (tert-butylcarbamates) and Fmoc protected (9-fluoenylmethyl carbamate) amino acids were purchased from Midwest Biotech. The solid phase peptide syntheses using Boc-protected amino acids were performed on an Applied Biosystem 430A Peptide Synthesizer. Fmoc protected amino acid synthesis was performed using the Applied Biosystems Model 433 Peptide Synthesizer. In specific embodiments, the following procedures can be used:

General Peptide Synthesis Protocol with Boc-Chemistry Strategy

[1206] Synthesis of peptides using Boc chemistry was performed on the Applied Biosystem Model 430A Peptide Synthesizer. Synthetic peptides were constructed by sequential addition of amino acids to a cartridge containing 2 mmol of Boc protected amino acid. Specifically, the synthesis was carried out using 3-(Diethoxy-phosphoryloxy)-3H-benzo[d][1,2,3]triazin-4-one (DEPBT) or HBTU as the coupling agent with single couplings. At the end of the coupling step, the peptidyl-resin was treated with trifluoroacetic acid (TFA) to remove the N-terminal Boc protecting group. The resin was then washed repeatedly with dimethylformamide (DMF) and this repetitive cycle was repeated for the desired number of coupling steps. Boc amino acids and HBTU were obtained from Midwest Biotech (Fishers, Ind.). General side chain protecting groups used were: Arg(Tos), Asn(Xan), Asp(OcHex), Cys(pMeBzl), His(Bom), Lys(2Cl—Z), Ser(OBzl), Thr(OBzl), Tyr(2Br-Z), and Trp(CHO). Boc-Glu(OFm)-OH and Boc-Lys(Fmoc)-OH (Chem-Impex, Wood dale, Ill.) were used in the lactam-bridge formation sites.

[1207] After assembly of the peptides, the Fmoc protected side chains were deprotected using 20% piperidine treatment. For the lactamization, orthogonal protecting groups were selected for Glu and Lys (e.g., Glu(Fm), Lys(Fmoc)). After removal of the protecting groups and before HF cleavage, cyclization was performed as described previously (see, e.g., International Patent Application Publication No. WO2008/101017). HF treatment of the peptidyl-resin

[1208] The peptidyl-resin was treated with anhydrous HF in the presence of p-cresol and dimethyl sulfide, which typically yielded approximately 350 mg (about 50% yield) of a crude deprotected-peptide. Specifically, the peptidyl-resin (30 mg to 200 mg) was placed in a hydrogen fluoride (HF) reaction vessel for cleavage. Then, 500 μL of p-cresol was added to the vessel as a carbonium ion scavenger. The vessel was attached to the HF system and submerged in a methanol/dry ice mixture. The vessel was evacuated with a vacuum pump and 10 mL of HF was distilled into the reaction vessel. This reaction mixture of the peptidyl-resin and the HF was stirred for one hour at 0° C., after which a vacuum was established and the HF was quickly evacuated (10-15 min) The vessel was removed carefully and filled with approximately 35 mL of ether to precipitate the peptide and to extract the p-cresol and small molecule organic protecting groups resulting from HF treatment. This mixture was filtered utilizing a Teflon filter and repeated twice to remove all excess cresol. This filtrate was discarded. The precipitated peptide was dissolved in approximately 20 mL of 10% acetic acid (aq). This filtrate, which contained the desired peptide, was collected and lyophilized.

[1209] An analytical HPLC analysis of the crude solubilized peptide was conducted under the following conditions [4.6×30 mm Xterra C8, 1.50 mL/min, 220 nm, A buffer 0.1% TFA/10% acetonitrile (CH₃CN), B buffer 0.1% TFA/100% CH₃CN, gradient 5-95% B over 15 minutes]. The extract was diluted twofold with water and loaded onto a 2.2×25 cm Vydac C4 preparative reverse phase column and eluted using an acetonitrile gradient on a Waters HPLC system (A buffer of 0.1% TFA/10% CH₃CN, B buffer of 0.1% TFA/10% CH₃CN and a gradient of 0-100% B over 120 minutes at a flow of 15.00 mL/min HPLC analysis of the purified peptide demonstrated greater than 95% purity and electrospray ionization mass spectral analysis was used to confirm the identity of the peptide.

General Peptide Synthesis Protocol with Fmoc-Chemistry Strategy:

[1210] Peptides were synthesized on an ABI 433A automated peptide synthesizer using standard Fmoc chemistry with Rink MBHA amide resin or first amino acid attached Wang resin (Novabiochem, San Diego, Calif.) using DIC/HOBT as coupling reagent. The side chain protecting groups of Nα-Fmoc [N-(9-fluorenyl)methoxycarbonyl]amino acids were as follows: Arg, Pmc; Asp, OtBu; Cys, Trt; Gln, Trt; H is, Trt; Lys, Boc; Ser, tBu, Tyr, tBu; and Trp, Boc (Pmc=2,2,5,7,8-pentamethylchoman-6-sulfonyl, OtBu=tert-butyl ester, Trt=trityl, Boc=tert-butyloxycarbonyl, and tBu=tert-butyl ester). Fmoc-Glu(O-2-PhiPr)-OH and Fmoc-Lys(Mmt)-OH (Novabiochem, San Diego, Calif.) were incorporated in the lactam-bridge formation sites.

[1211] After solid phase synthesis, the 2-phenylisopropyl (2-PhiPr) group on the Glu and the 4-methoxytrityl (Mmt) group on the Lys were removed by flashing 1% TFA/DCM though the peptidyl resin. For the lactam-bridge formation, usually 150 mg (0.5 mmole, 5-fold) BEPBT were added in 10% DIEA/DMF and reacted for 2 to 4 h until ninhydrin test shown negative.

[1212] Peptides were cleaved from the resin with cleavage cocktail containing 85% TFA, 5% phenol, 5% water and 5% thioanisole (2.5% EDT was added when peptide contains Cysteine). Crude peptides were precipitated in ether, centrifuged, and lyophilized. Peptides were then analyzed by analytical HPLC and checked by ESI or MALDI-TOF mass spectrometry. Peptides were purified by the general HPLC purification procedure.

### Peptide Acylation

[1213] Acylated peptides were prepared as follows. Peptides were synthesized on a solid support resin using either a CS Bio 4886 Peptide Synthesizer or Applied Biosystems 430A Peptide Synthesizer. In situ neutralization chemistry was used as described by Schnolzer et al., Int. J. Peptide Protein Res. 40: 180-193 (1992). For acylated peptides, the target amino acid residue to be acylated (e.g., position ten, relative to the amino acid position numbering of SEQ ID NO: 1601) was substituted with an N ε-FMOC lysine residue. Treatment of the completed N-terminally BOC protected peptide with 20% piperidine in DMF for 30 minutes removed FMOC/formyl groups. Coupling to the free ε-amino Lys residue was achieved by reacting a ten-fold molar excess of either an FMOC-protected spacer amino acid (ex. FMOC-Glu-OtBu) or acyl chain (e.g. CH₃(CH₂)₁₄—COOH) and benzotriazol-1-yl-oxytripyrrolidinophosphonium hexafluorophosphate (PyBOP), N,N′ diisopropylcarbodiimide (DIC), or DEPBT coupling reagent in DMF/diisopropylethylamine (DIEA). Subsequent removal of the spacer amino acid's FMOC group was followed by repetition of coupling with an acyl chain. Final treatment with 100% TFA resulted in removal of any side chain protecting groups and the N-terminal BOC group. Peptide resins were neutralized with 5% DIEA/DMF, dried, and then cleaved from the support using HF/p-cresol, 95:5, at 0° C. for one hour. Following ether extraction, a 5% acetic acid (HOAc) solution was used to solvate the crude peptide. A sample of the solution was then verified to contain the correct molecular weight peptide by ESI-MS. Correct peptides were purified by reverse phase (RP)HPLC using a linear gradient of 10% CH₃CN/0.1% TFA to 0.1% TFA in 100% CH₃CN. A Vydac C18 22 mm×250 mm protein column was used for the purification. Acylated peptide conjugates generally completed elution by a buffer ratio of 20:80. Portions were pooled together and checked for purity on an analytical RP-HPLC. Pure fractions were lyophilized yielding white, solid peptides.

[1214] If a peptide comprised a lactam bridge and target residues to be acylated, acylation was carried out as described above upon addition of that amino acid to the peptide backbone.

### Peptide PEGylation to Form Thioether Linkages

[1215] For peptide PEGylation, 40 kDa methoxy poly(ethylene glycol) idoacetamide was reacted with a molar equivalent of peptide in 7M Urea, 50 mM Tris-HCl buffer using the minimal amount of solvent needed to dissolve both peptide and PEG into a clear solution (generally less than 2 mL for a reaction using 2 to 3 mg peptide). Vigorous stirring at room temperature commenced for 4 to 6 hours and the reaction analyzed by analytical RP-HPLC. PEGylated products appeared distinctly from the starting material with decreased retention times. Purification was performed on a Vydac C4 column with conditions similar to those used for the initial peptide purification. Elution occurred around buffer ratios of 50:50. Fractions of pure PEGylated peptide were found and lyophilized. Yields were above 50%, varying per reaction.

### Peptide PEGylation to Form Maleimido Linkages

[1216] For peptide PEGylation, the peptide containing a cysteine was dissolved in phosphate buffered saline (5-to0 mg/mL) and 0.01 Methylenediamine tetraacetic acid is added (10-15% of total volume). Excess (2-fold) maleimido methoxyPEG reagent (Dow) was added and the reaction was stirred at room temperature while monitoring reaction progress by high performance liquid chromatography (HPLC). After 8-24 hrs, the reaction mixture is acidified and loaded onto a preparative reverse phase column for purification using 0.1% tetrafluoroacetic acid (TFA)/acetonitrile in the gradient mode. The appropriate fractions were combined and lyophilized to give the desired pegylated derivatives.

### Analysis Using Mass Spectrometry

[1217] The mass spectra were obtained using a Sciex API-III electrospray quadrupole mass spectrometer with a standard ESI ion source. Ionization conditions that were used are as follows: ESI in the positive-ion mode; ion spray voltage, 3.9 kV; orifice potential, 60 V. The nebulizing and curtain gas used was nitrogen flow rate of 0.9 L/min Mass spectra were recorded from 600-1800 Thompsons at 0.5 Th per step and 2 msec dwell time. The sample (about 1 mg/mL) was dissolved in 50% aqueous acetonitrile with 1% acetic acid and introduced by an external syringe pump at the rate of 5 μL/min.

[1218] When the peptides were analyzed in PBS solution by ESI MS, they were first desalted using a ZipTip solid phase extraction tip containing 0.6 μL C4 resin, according to instructions provided by the manufacturer (Millipore Corporation, Billerica, Mass., see the Millipore website of the world wide web at millipore.com/catalogue.nsf/docs/C5737).

### High Performance Liquid Chromatography (HPLC) Analysis:

[1219] Preliminary analyses were performed with these crude peptides to get an approximation of their relative conversion rates in Phosphate Buffered Saline (PBS) buffer (pH, 7.2) using high performance liquid chromatography (HPLC) and MALDI analysis. The crude peptide samples were dissolved in the PBS buffer at a concentration of 1 mg/mL. 1 mL of the resulting solution was stored in a 1.5 mL HPLC vial which was then sealed and incubated at 37° C. Aliquots of 100 μl were drawn out at various time intervals, cooled to room temperature and analyzed by HPLC.

[1220] The HPLC analyses were performed using a Beckman System Gold Chromatography system using a UV detector at 214 nm HPLC analyses were performed on a 150 mm×4.6 mm C18 Vydac column The flow rate was 1 mL/min Solvent A contained 0.1% TFA in distilled water, and solvent B contained 0.1% TFA in 90% CH₃CN. A linear gradient was employed (40% to 70% B in 15 minutes). The data were collected and analyzed using Peak Simple Chromatography software.

### Example 2

[1221] The ability of each peptide to induce cAMP was measured in a firefly luciferase-based reporter assay. The cAMP production that is induced is directly proportional to the glucagon fragment binding to the glucagon receptor or GIP receptor or GLP-1 receptor. HEK293 cells co-transfected with the receptor and luciferase gene linked to a cAMP responsive element were employed for the bioassay.

[1222] The cells were serum-deprived by culturing 16 hours in Dulbecco-modified Minimum Essential Medium (Invitrogen, Carlsbad, Calif.) supplemented with 0.25% Bovine Growth Serum (HyClone, Logan, Utah) and then incubated with serial dilutions of glucagon fragments for 5 hours at 37° C., 5% CO₂ in 96 well poly-D-Lysine-coated “Biocoat” plates (BD Biosciences, San Jose, Calif.). At the end of the incubation, 100 μL of LucLite luminescence substrate reagent (Perkin Elmer, Wellesley, Mass.) were added to each well. The plate was shaken briefly, incubated 10 min in the dark and light output was measured on MicroBeta-1450 liquid scintillation counter (Perkin-Elmer, Wellesley, Mass.). The effective 50% concentrations (EC₅₀) and inhibitory 50% concentrations (IC₅₀) were calculated by using Origin software (OriginLab, Northampton, Mass.). All EC₅₀s and IC₅₀s are reported in the following examples in nM, unless indicated otherwise.

### Example 3

### Preparation of GLP-1/Estrogen(3-Ether)

[1223] A GLP-1 analog was synthesized using the Boc protocol disclosed in Example 1 with a Boc-Lys(Fmoc)-OH residue at the C-terminus. (The Fmoc group protecting the side chain amine on the lysine residue was removed with 20% piperidine/DMF for 30 minutes prior to the addition of product 4.) Estradiol 17-acetate was derivatized at the 3-position by reaction with ethyl 2-bromoacetic acid. The derivatized estradiol was hydrolyzed and reacted with the C-terminal lysine of the GLP-1 analog to result in the GLP-1/Estrogen(3-Ether) conjugate, as shown below:

[chemical structure]

[1224] Specifically, equimolar amounts of estradiol 17-acetate (1) and ethyl 2-bromoacetate (2) were dissolved in dioxane/K₂CO₃, and the reaction was stirred for 16 hours under reflux conditions. The reaction solvent was evaporated in vacuo and the product (3) was re-suspended in dioxane. NaOH (1N) was slowly added and stirred for 2 hours. The reaction solvent was evaporated in vacuo and product (4) washed 3 times and re-suspended in dichloromethane. HCl (1N) was slowly added to acidify the product. Product 4 and the resin-bound peptide were mixed in HOBt/DIC/NMP for 4 hours, filtered, treated with trifluoroacetic acid, and cleaved from the resin by treatment with hydrofluoric acid. The peptide-estrogen conjugate was purified using reverse-phase HPLC and characterized by ESI mass spectrometry.

### Example 4

### Preparation of GLP-1/Estrogen(17-Carbamate)

[1225] A GLP-1 analog was synthesized using the Boc protocol disclosed in Example 1 with a Boc-Lys(Fmoc)-OH residue at the C-terminus. (The Fmoc group protecting the side chain amine on the lysine residue was removed with 20% piperidine/DMF for 30 minutes prior to the conjugation of the estrogen derivative). B-Estradiol 3-benzoate was derivatized at the 17-position by reaction with 4-nitrophenyl chloroformate. The derivatized estradiol with reacted with the C-terminal lysine of a GLP-1 analog to result in the GLP-1/Estrogen(17-Ester) conjugate, as shown below:

[chemical structure]

[1226] Specifically, β-estradiol 3-benzoate (1) and a 2-fold excess of 4-nitrophenyl chloroformate (2) were stirred together in pyridine, toluene, and DMAP under reflux conditions for 24 hours. The reaction solvent was evaporated in vacuo and the product, 13-estradiol 17-nitrophenyl ester 3-benzoate (3), was resuspended in ethyl acetate. The reaction product was washed twice with aqueous HCl (0.01N) followed by a single wash with water. The ethyl acetate was evaporated in vacuo and the product (3) was precipitated with hexane. Product 3 and the resin-bound peptide were mixed in NMP/5% DIEA for 4 hours, filtered, treated with TFA, and cleaved from the resin by HF treatment. The peptide-estrogen conjugate was purified using reverse-phase HPLC and characterized by ESI mass spectrometry.

### Example 5

### Preparation of GLP-1/Estrogen(17-Ester)

[1227] A GLP-1 analog was synthesized using the Boc protocol disclosed in Example 1 with a Boc-Lys(Fmoc)-OH residue at the C-terminus. (The Fmoc group protecting the side chain amine on the lysine residue was removed with 20% piperidine/DMF for 30 minutes prior to the conjugation of the estrogen derivative). Estradiol was derivatized at the 17-position by reaction with succinic anhydride. The derivatized estradiol with reacted with the C-terminal lysine of a GLP-1 analog to result in the GLP-1/Estrogen(17-Ester) conjugate, as shown below:

[chemical structure]

[1228] Specifically, β-estradiol 17-acetate (1) and a 10-fold excess of succinic anhydride (2) were stirred together in DMF with 5% DIEA and DMAP for 48 hours at room temperature. After 48 hours, the reaction solvent was evaporated in vacuo and the product (3) was re-suspended in ethyl acetate. The reaction product (3) was washed with aqueous HCl (0.01N) two times followed by a single wash with water. The ethyl acetate was evaporated in vacuo and the product (3) was re-suspended in a mixture of MeOH/acetonitrile/water. The estrogen derivative product (3) was purified by reverse-phase HPLC. Lyophilized product (3) and the resin-bound peptide were mixed in HOBt/DIC/NMP for 4 hours, filtered, treated with TFA, and cleaved from the resin by HF treatment. The peptide-estrogen conjugate was purified using reverse-phase HPLC and characterized by ESI mass spectrometry.

### Example 6

### Preparation of GLP-1/Estrogen(3-Ester)

[1229] A GLP-1 analog was synthesized using the Boc protocol disclosed in Example 1 with a Boc-Lys(Fmoc)-OH residue at the C-terminus. (The Fmoc group protecting the side chain amine on the lysine residue was removed with 20% piperidine/DMF for 30 minutes prior to the conjugation of the estrogen derivative). Estradiol 17-acetate was derivatized at the 3-position by reaction with succinic anhydride. The derivatized estradiol with reacted with the C-terminal lysine of the GLP-1 analog to result in the GLP-1/Estrogen(3-Ester) conjugate, as shown below:

[chemical structure]

[1230] Specifically, β-estradiol 17-acetate (1) and a 10-fold excess of succinic anhydride (2) were stirred together in DMF with 5% DIEA and DMAP for 48 hours at room temperature. After 48 hours, the reaction solvent was evaporated in vacuo and the product (3) was re-suspended in ethyl acetate. The reaction product (3) was washed with aqueous HCl (0.01N) two times followed by a single wash with water. The ethyl acetate was evaporated in vacuo and the product (3) was re-suspended in a mixture of MeOH/acetonitrile/water. The estrogen derivative product (3) was purified by reverse-phase HPLC. Lyophilized product (3) and the resin-bound peptide were mixed in HOBt/DIC/NMP for 4 hours, filtered, treated with TFA, and cleaved from the resin by HF treatment. The peptide-estrogen conjugate was purified using reverse-phase HPLC and characterized by ESI mass spectrometry.

### Example 7

### Preparation of GLP-1/Estrone 3-Ester)

[1231] A GLP-1 analog was synthesized using the Boc protocol disclosed in Example 1 with a Boc-Lys(Fmoc)-OH residue at the C-terminus. (The Fmoc group protecting the side chain amine on the lysine residue was removed with 20% piperidine/DMF for 30 minutes prior to the conjugation of the estrogen derivative). Estrone was derivatized at the 3-position by reaction with succinic anhydride. The derivatized estrone was with reacted with the C-terminal lysine of the GLP-1 analog to result in the GLP-1/Estrone(3-Ester) conjugate, as shown below:

[chemical structure]

[1232] Specifically, estrone (1) and a 10-fold excess of succinic anhydride (2) were stirred together in DMF with 5% DIEA and DMAP for 48 hours at room temperature. After 48 hours, the reaction solvent was evaporated in vacuo and the product (3) was re-suspended in ethyl acetate. The reaction product (3) was washed with aqueous HCl (0.01N) two times followed by a single wash with water. The ethyl acetate was evaporated in vacuo and the product (3) was re-suspended in a mixture of MeOH/acetonitrile/water. The estrone derivative product (3) was purified by reverse-phase HPLC. Lyophilized product (3) and the resin-bound peptide were mixed in HOBt/DIC/NMP for 4 hours, filtered, treated with TFA, and cleaved from the resin by HF treatment. The peptide-estrogen conjugate was purified using reverse-phase HPLC and characterized by ESI mass spectrometry.

### Example 8

### Preparation of GLP-1/Estrogen(17-Hydrazone)

[1233] A GLP-1 analog was synthesized using the Boc protocol disclosed in Example 1. The peptide was synthesized using Boc-based in situ neutralization chemistry with a Boc-Cys(4-MeBzl)-OH residue at the C-terminus to facilitate the addition of estrogen. Estrone was derivatized at the 17-position by reaction with maleimidocaproic acid hydrazide. The derivatized estrone was with reacted with the C-terminal cysteine of the GLP-1 analog to result in the GLP-1/Estradiol(17-Hydrazone) conjugate, as shown below:

[chemical structure]

[1234] Specifically, equimolar amounts of estrone (1) and ε-maleimidocaproic acid hydrazide (2) were stirred together in MeOH with 0.1% TFA for 4 hours at room temperature. After 4 hours, the reaction solvent was evaporated in vacuo and the product (3) was precipitated in cold ether and purified on a silica column. A 5-fold excess of product 3 was mixed with the cleaved and purified peptide in a mixture of DMF, ACN, Tris, and water at pH 7.5 for 24 hours at room temperature to generate the peptide-estrogen conjugate. The peptide-estrogen conjugate was purified using reverse-phase HPLC and characterized by ESI mass spectroscopy.

### Example 9

### Preparation of GLP-1/Estrogen(17-Carbamate Disulfide) (Hindered and Unhindered)

[1235] A GLP-1 analog was synthesized using the Boc protocol disclosed in Example 1. The peptide was synthesized using Boc-based in situ neutralization chemistry with a Boc-Cys(4-MeBzl)-OH residue (to result in an unhindered disulfide conjugate) or a Boc-Pen(4-MeBzl)-OH residue (to result in a hindered disulfide conjugate) at the C-terminus to facilitate the addition of estrogen. B-Estradiol 3-benzoate was derivatized at the 17-position by reaction with 4-nitrophenyl chloroformate. The intermediate was then reacted with pyridyldithio-ethylamine-HCl and subjected to a disulfide exchange reaction to with the C-terminal cysteine of the GLP-1 analog to result in the GLP-1/Estradiol(17-Carbamate Disulfide) conjugate, as shown below:

[chemical structure]

[1236] First, equimolar amounts of Aldrithiol-2 (1) and 2-mercaptoethylamine HCl (2) were stirred together in MeOH with 2% AcOH for 48 hours at room temperature. After 48 hours, the reaction solvent was evaporated in vacuo and the product (3) was precipitated in cold ether. Second, β-estradiol 3-benzoate (4) and a 2-fold excess of 4-nitrophenyl chloroformate (5) were stirred together in pyridine, toluene, and DMAP under reflux conditions for 4 hours. The reaction solvent was evaporated in vacuo and the product, β-estradiol 17-nitrophenyl ester 3-benzoate (6), was resuspended in ethyl acetate. This reaction product was washed twice with aqueous HCl (0.01N) followed by a single wash with water, which were removed in a separatory funnel. The ethyl acetate was evaporated in vacuo and the product (6) was precipitated with hexane.

[chemical structure]

[1237] Equimolar amounts of pyridyldithio-ethylamine HCl (3) and β-estradiol 17-nitrophenyl ester 3-benzoate (6) were stirred together in pyridine with 5% DIEA and DMAP for 48 hours at room temperature. After 48 hours, the reaction solvent was evaporated in vacuo and the product (7) was resuspended in ethyl acetate. This reaction product was washed twice with aqueous HCl (0.01N) followed by a single wash with water, and the ethyl acetate was evaporated in vacuo. The 3-benzoate group on product (7) was removed by treatment with 0.25% K₂CO₃ in dioxane and methanol for 3 hours at room temperature to generate the product β-estradiol 17-carbamate S—S—NPy (8), which was purified on a silica column A 5-fold excess of product 8 was mixed with the cleaved and purified peptide (with either a cysteine residue or a penicillamine residue at position 40) in NMP and Tris at pH 7.5 for 48 hours at room temperature to generate the peptide-estrogen conjugate. The peptide-estrogen conjugate was purified using reversed-phase HPLC and characterized by ESI mass spectroscopy

### Example 10

### Preparation of GLP-1/Estrogen(17-Cathepsin Diaminoethane)

[1238] A GLP-1 analog was synthesized using the Boc protocol disclosed in Example 1. The peptide was synthesized using Boc-based in situ neutralization chemistry with a Z-His(BOM)-OH residue at the N-terminus, and a Boc-Lys(Fmoc)-OH at the C-terminus to facilitate the addition of the dipeptide spacer and estrogen. B-Estradiol 17—nitrophenyl ester benzoate was derivatized at the 17-position to result in the GLP-1/Estradiol(17-Cathespsin Diaminoethane) conjugate, as shown below:

[chemical structure]

[chemical structure]

[1239] Fmoc-Phy-Lys(Cl—Z)—OH (1) was synthesized utilizing Fmoc-base in situ neutralization chemistry on a Wang resin, and cleaved from the resin with TFA/DCM. Equimolar amounts of Fmoc-Phe-Lys(Cl—Z)—OH (1) and Boc-ethylenediamine (2) were stirred together in HOBt, DIC, and DCM for 4 hours at room temperature. This reaction product was washed twice with aqueous HCl (0.01N) followed by a single wash with water, which were removed in a separatory funnel, and the ethyl acetate was evaporated in vacuo. After the washing steps, the reaction product was treated with 20% piperidine in DMF for 30 minutes to remove the N-terminal Fmoc group to generate NH₂-Phe-Lys(C1-Z)-EDA-Boc (3), which was precipitated in cold ether after removal of the piperidine/DMF solvent in vacuo. NH₂-Phe-Lys(Cl—Z)-EDA-Boc (3) was stirred with a 2-fold excess of succinic anhydride (4) in DMF, 5% DIEA, and DMAP for 16 hours at room temperature, after which the reaction solvent was evaporated in vacuo and resuspended in MeOH, acetonitrile, and water. The reaction product, hemisuccinate-Phe-Lys(C1-Z)-EDA-Boc (5), was purified by reverse phase HPLC. A 5-fold excess of lyophilized product (5) and the resin-bound peptide were mixed in HOBt/DIC/NMP for 16 hours, filtered, and treated with TFA to generate the product GLP-1+hemisuccinate-Phe-Lys(Cl—Z)-EDA (6). This resin-bound product (6) was mixed with a 5-fold excess of 13-estradiol 17-nitrophenyl ester 3-benzoate (7) in NMP/5% DIEA for 16 hours, filtered, and cleaved from the resin by HF treatment to generate the final product (8). The peptide-estrogen conjugate was purified using reversed-phase HPLC and characterized by ESI mass spectroscopy.

### Example 11

### Preparation of GLP-1/Cholesterol 3-Amide)

[1240] A GLP-1 analog was synthesized using the Boc protocol disclosed in Example 1. The peptide was synthesized using Boc-based in situ neutralization chemistry with a Boc-Lys(Fmoc)-OH residue at the C-terminus Cholesterol 3-carboxylic acid was reacted at the with the C-terminal lysine of the GLP-1 analog to result in the GLP-1/Cholesterol(3-Amide) conjugate, as shown below:

[chemical structure]

[1241] Specifically, cholesterol 3-carboxylic acid (1) and the resin-bound peptide were mixed in HOBt/DIC/NMP for 16 hours, filtered, treated with TFA, and cleaved from the resin by HF treatment. The Fmoc group protecting the side chain amine on the lysine residue was removed with 20% piperidine/DMF for 30 minutes prior to the addition of product 4. The peptide-cholesterol conjugate (2) was purified using reversed-phase HPLC and characterized by ESI mass spectrometry. If the peptide backbone was PEGylated, then a cysteine residue was added at position 24 in the sequence to facilitate the addition of the PEG moiety, which was added to the peptide-cholesterol conjugate by mixing equimolar amounts of iodoacetyl 40 k PEG with the conjugate in a 7M urea/0.05 M Tris buffer at pH 8.5 for 1 hour.

### Example 12

### Estrogen Receptor Binding Assay

[1242] PhosphoImager Protocol w/Purified ERα & Millipore Filter Plate

[1243] The following reagents were used to perform the estrogen receptor binding assay:

[1244] Ligand Binding Buffer (pH 7.6), 50 mM HEPES-Sodium salt, 1 mM CaCl₂, 5 mM MgCl₂, 0.5% BSA, Sucrose Cushion (pH 7.6), 20% Sucrose, 120 mM NaCl, 40 mM Tris-HCl, 0.4% BSA, Polyethyleneimine (PEI), and 0.25% PEI.

[1245] Titration of “Cold” Estradiol

[1246] A stock dilution of cold estradiol at 5-fold higher concentration then the highest desired test concentration was prepared. The highest concentration that was tested is 10 μM. Thus, a stock of 50 μM was prepared with a total volume of 500 μl. Exactly 40 μl of binding buffer was added to each well of a titration plate, excluding columns 11 and 12. Exactly 60 μl of the stock concentration was added to each well of column 11 of the titration plate. A 3-fold titration was performed by transferring 20 μl from column 11 to column 10 and mixing. Each subsequent column through column 1 was titrated. Exactly 20 μl was transferred from each well of the titration plate to the corresponding wells on the assay plate. Exactly 20 μl of binding buffer was added to the “total binding” wells (wells 12(A-D)). Exactly 20 μl of 100 μM of cold estradiol was added to the “non-specific binding” wells (wells 12(E-H)).

[1247] Constant Concentration of “Hot” Estradiol

[1248] A stock solution of labeled estradiol was prepared at a 5-fold higher concentration then the desired test concentration, which is 0.05 nM. Thus, a stock of 0.25 nM labeled estradiol was prepared with at least a total volume of 2.3 mL. The labeled estradiol comes in solution at 10 uCi at a volume of 100 μl, which correlates to a concentration of 45.45 nM using the conversion of 2200 Ci/mmol For 2.3 mL of a 0.25 nM stock, 12.65 μL of the labeled estradiol was added to 2.29 ml of binding buffer. Exactly 20 μL of stock solution was added to each well of the assay plate according to design.

[1249] Titration of Purified Estrogen Receptor Alpha

[1250] The purified estrogen receptor was tested at a concentration of 1.5 nM. Because 60 μL of estrogen receptor was added to each well, a stock concentration that was 1.667 times higher was prepared. For a test concentration of 1.5 nM, a stock concentration of 2.5 nM was prepared. A volume of 7.0 mL of 2.5 nM receptor was prepared by adding 8.4 μL of the stock to 6.99 mL of binding buffer. Exactly 60 μL of the receptors was then transferred to the appropriate wells in the assay plate.

[1251] Assay

[1252] The assay plate (containing cold ligand, hot ligand, and cell lysates) was incubated at room temperature for 2 hours. Exactly 25 μL of 0.25% PEI was added to each well of the filter plate. The filter plate was allowed to incubate for 20 minutes before clearing the wells by vacuum. Exactly 80 μL of the suspensions in the assay plate was transferred to the PEI-coated filter plate. The samples were vacuumed through the filter plate using the vacuum manifold. The filter plates were washed plates several times with binding buffer and then wrapped in cellophane. The plates were secured on the surface of the phosphor-imaging screen with the well bottoms closest to the screen. The phosphor-imaging screen and plate was placed in a radio film bag and exposed for 48 hours. The imaging screen was scanned using the phosphoimager and the exposure file was collected.

### Example 13

[1253] Mice (db/db, N=6, average initial body weight=54 g) were subcutaneously injected once per day for four weeks with vehicle or 40 or 400 μg/kg of one of the following:

[1254] (a) GLP-1 (Aib²A²²CexK⁴⁰) (400 μg/kg-day),

[1255] (b) GLP-1 (Aib²A²²CexK⁴⁰)/Estrogen(17-ester) (40 μg/kg-day), or

[1256] (c) GLP-1 (Aib²A²²CexK⁴⁰)/Estrogen(17-ester) (400 μg/kg-day).

[1257] Body weight was measured after 23 days and the change in body weight was determined (FIG. 2a). Mice that were administered a high dose of the GLP-1(Aib²A²²CexK⁴⁰)/Estrogen(17-ester) conjugate experienced a greater decrease in body weight then mice that were administered GLP-1 alone.

[1258] The effect of the GLP-1 (Aib²A²²CexK⁴⁰)/Estrogen(17-ester) conjugate on cumulative food intake over a period of 23 days was also determined Mice that were administered a high dose of the GLP-1 (17-ester)/Estrogen(17-ester) conjugate consumed less food than those that were administered GLP-1 alone.

[1259] FIGS. 2b and 2c show the effect of the GLP-1 (Aib²A²²CexK⁴⁰)/Estrogen(17-ester) conjugate on blood glucose levels (mg/dL). Mice that were administered a high dose of the GLP-1 (Aib²A²²CexK⁴⁰)/Estrogen(17-ester) conjugate experienced the greatest decrease in blood glucose levels between days 0 and 14.

### Example 14

### In Vivo Effects of GLP-1/Estrogen Conjugates

[1260] Diet-induced obesity (DIO) mice (N=8, 6 mice per group, average initial body weight=58 g) were subcutaneously injected once per day for four weeks with vehicle or 4, 40, or 400 μg/kg of one of the following:

[1261] (a) GLP-1 (Aib²E¹⁶CexK⁴⁰) (40 μg/kg-day),

[1262] (b) GLP-1 (Aib²A²²CexK⁴⁰) (400 μg/kg-day), or

[1263] (c) GLP-1 (Aib²A²²CexK⁴⁰)/Estrogen(17-ester) (4, 40, or 400 μg/kg-day).

[1264] A saline solution comprising 25% (v/v) glucose was injected at a dose of 1.5 g/kg of body weight at the 0 min time point on days 7 and 21. Blood glucose was measured at the 0, 15, 30, 60, and 120 min time points on day 7 and day 21 (FIG. 3a).

[1265] Body weight was measured after 23 days and the change in body weight, change in fat mass, and change in lean muscle mass were determined (FIGS. 3b-d). Mice that were administered a high dose of the GLP-1 (Aib²A²²CexK⁴⁰)/Estrogen(17-ester) conjugate experienced the greatest decrease in body weight and fat mass, and the least amount of lean muscle mass loss.

[1266] The effect of the GLP-1 (Aib²A²²CexK⁴⁰)/Estrogen(17-ester) conjugate on cumulative food intake over a period of 23 days was also determined. Mice that were administered a high dose of the GLP-1 (Aib²A²²CexK⁴⁰)/Estrogen(17-ester) consumed the least amount of food.

[1267] FIG. 3e shows the effect of the GLP-1 (Aib²A²²CexK⁴⁰)/Estrogen(17-ester) conjugate on the change blood glucose. Mice that were administered a high dose of the GLP-1(Aib²A²²CexK⁴⁰)/Estrogen(17-ester) conjugate experienced the greatest decrease in blood glucose levels between days 0 and 14. These results demonstrate the added dose dependent efficacy of adding estrogen to a weak A22-based GLP-1 agonist.

### Example 15

[1268] Diet-induced obesity (DIO) mice (N=8, average initial body weight=59 g) were subcutaneously injected once per day for four weeks with vehicle or one of the following:

[1269] (a) GLP-1 (Aib²E¹⁶CexK⁴⁰) (40 or 400 μg/kg-day),

[1270] (b) GLP-1 (Aib²E¹⁶CexK⁴⁰)/Estrogen (17-ester) (40 or 400 μg/kg-day), or

[1271] (c) GLP-1 (Aib²E¹⁶CexK⁴⁰)/Estrogen(3-ether) (40 or 400 μg/kg-day).

[1272] A saline solution comprising 25% (v/v) glucose was injected at a dose of 1.5 g/kg of body weight at the 0 min time point on day 14. Blood glucose levels were measured at the 0, 15, 30, 60, and 120 min time points. FIG. 4a presents data from this experiment.

[1273] Body weight was measured after 21 days and the change in total body weight and fat mass were determined (FIGS. 4b-c). Mice that were administered a high dose of the GLP-1/Estrogen conjugates experienced the greatest decrease in total body weight (FIG. 4b). Fat mass was decreased in the high dose estrogen ether conjugate relative to vehicle-treated animals (FIG. 4c). The ester conjugates had a greater effect on total body weight than the ether conjugates, and the ether conjugates had a greater effect on fat mass than the ester conjugates.

[1274] The effect of the GLP-1 (Aib²E¹⁶CexK⁴⁰)/Estrogen conjugates on cumulative food intake over a period of 21 days was also determined Mice that were administered a GLP-1/Estrogen conjugate consumed less food than mice that were administered GLP-1 (Aib²E¹⁶Cex K⁴⁰) alone.

[1275] FIG. 4d shows the effect of the GLP-1 (Aib²E¹⁶CexK⁴⁰)/Estrogen conjugates on blood glucose levels (mg/dL). At a high dose, mice that were administered either GLP-1 (Aib²E¹⁶CexK⁴⁰)/Estrogen conjugate experienced a greater change in blood glucose levels between days 0 and 21 than mice that were administered GLP-1 (Aib²E¹⁶CexK⁴⁰) alone.

### Example 16

[1276] Mice (N=8, 11 months old, average body weight 60 g) that were on a diabetic diet for 9 months were subcutaneously injected with vehicle or one of the following:

[1277] (a) GLP-1 (Aib²E¹⁶CexK⁴⁰) (40 or 400 μg/kg/day),

[1278] (b) GLP-1 (Aib²E¹⁶CexK⁴⁰)/Estrogen(3-ether) (40 or 400 μg/kg-day),

[1279] (c) dGLP-1 (A¹Aib²A²²CexK⁴⁰)/Estrogen(3-ether) (40 or 400 μg/kg-day),

[1280] (d) GLP-1 (Aib²E¹⁶C²⁴(PEG-40 kDa)CexK⁴⁰)/Estrogen (3-ether) (40, 400 μg/kg-day),

[1281] (e) GLP-1 (Aib²E¹⁶C²⁴(PEG-40 kDa)CexK⁴⁰)/Estrogen (3-ether) (40 μg/kg-week), or

[1282] (f) GLP-1 (Aib²E¹⁶C²⁴(PEG-40 kDa)CexK⁴⁰) (40 μg/kg-week).

[1283] Body weight was measured after 7 days and the change in body weight was determined (FIG. 5a). Mice that were administered a high dose of the GLP-1/Estrogen conjugates experienced the greatest decrease in body weight, however mice that were administered the low daily dose of the GLP-1/Estrogen conjugates also experienced significant decrease in body weight.

[1284] The effect of the GLP-1 (Aib²E¹⁶K⁴⁰Cex)/Estrogen(3-ether), dGLP-1 (A¹Aib²A²²CexK⁴⁰)/Estrogen(3-ether), and GLP-1 (Aib²E¹⁶C²⁴ (PEG-40 kDa)CexK⁴⁰)/Estrogen (3-ether) conjugates on cumulative food intake over a period of 7 days was also determined. Mice that were administered either high or low doses of GLP-1 (Aib²E¹⁶K⁴⁰Cex)/Estrogen(3-ether) and GLP-1 (Aib²E¹⁶K⁴⁰Cex) or the low daily dose of GLP-1 (Aib²E¹⁶C²⁴(PEG-40 kDa)CexK⁴⁰) consumed the least amount of food.

[1285] FIG. 5b shows the effect of the GLP-1 (Aib²E¹⁶K⁴⁰Cex)/Estrogen(3-ether), dGLP-1(A¹Aib²A²²CexK⁴⁰)/Estrogen(3-ether), and GLP-1 (Aib²E¹⁶C²⁴(PEG-40 kDa)CexK⁴⁰)/Estrogen (3-ether) conjugates on the change in blood glucose levels (mg/dL). Mice that were administered either high or low doses of GLP-1 (Aib²E¹⁶K⁴⁰Cex) experienced the greatest change in blood glucose, along with that of the high dose GLP-1 (Aib²E¹⁶K⁴⁰Cex)/estrogen(3-ether).

### Example 17

[1286] Diet-induced obesity (DIO) mice (N=8, average initial body weight=65 g) were subcutaneously injected once per day for one week with vehicle or 40 μg/kg one of the following:

[1287] (a) GLP-1 (Aib²E¹⁶CexK⁴⁰),

[1288] (b) dGLP-1 (A¹Aib²A²²CexK⁴⁰),

[1289] (c) GLP-1 (Aib²A²²CexK⁴⁰),

[1290] (d) GLP-1 (Aib²E¹⁶CexK⁴⁰)/Estrogen(3-ether),

[1291] (e) dGLP-1 (A¹Aib²A²²CexK⁴⁰)/Estrogen(3-ether),

[1292] (f) GLP-1 (Aib²A²²CexK⁴⁰)/Estrogen(3-ether),

[1293] (g) GLP-1 (Aib²E¹⁶CexK⁴⁰)/Estrogen(17-ester)

[1294] (h) dGLP-1 (A¹Aib²A²²CexK⁴⁰)/Estrogen(17-ester), or

[1295] (i) GLP-1 (Aib²A²²CexK⁴⁰)/Estrogen(17-ester).

[1296] Body weight was measured after 7 days and the change in body weight and the fat mass were determined (FIG. 6a-b). Mice that were administered either estrogen conjugate experienced the greatest decrease in total body weight. The analysis of fat mass (FIG. 6b) was relatively constant with total loss in body weight.

[1297] FIG. 6c shows the effect of the GLP-1/Estrogen conjugates on the change in blood glucose (mg/dL). Mice that were administered a GLP-1 (Aib²E¹⁶K⁴⁰Cex)/Estrogen(3-ether) or a (Aib²E¹⁶K⁴⁰Cex)/Estrogen(17-ester) conjugate experienced the greatest change in blood glucose between days 0 and 7.

### Example 18

[1298] Mice (N=8, 11 months old, average body weight 60 g) that were on a diabetic diet for 9 months were administered subcutaneous injections once per day for one week with vehicle or 400 μg/kg of one of the following:

[1299] (a) GLP-1 (Aib²E¹⁶CexK⁴⁰),

[1300] (b) GLP-1 (Aib²E¹⁶CexK⁴⁰)/Estrogen(3-ether),

[1301] (c) GLP-1 (Aib²E¹⁶CexK⁴⁰)/Estrogen(17-ester),

[1302] (d) dGLP-1 (A¹Aib²A²²Cex⁴⁰),

[1303] (e) dGLP-1 (A¹Aib²A²²Cex⁴⁰)/Estrogen(3-ether),

[1304] (f) dGLP-1 (A¹Aib²A²²Cex⁴⁰)/Estrogen(17-ester),

[1305] (g) GLP-1 (Aib²A²²Cex⁴⁰),

[1306] (h) GLP-1 (Aib²A²²CexK⁴⁰)/Estrogen(3-ether), or

[1307] (i) GLP-1 (Aib²A²²CexK⁴⁰)/Estrogen(17-ester)

[1308] Body weight was measured after 7 days and the change in body weight was determined (FIG. 7a). Mice that were administered the GLP-1 (Aib²A²²CexK⁴⁰)/Estrogen conjugates experienced the greatest decrease in total body weight. GLP-1/Estrogen conjugates showed greater body weight reduction in vivo than the corresponding GLP-1 peptides that were not conjugated to estrogen.

[1309] The effect of the GLP-1/Estrogen conjugates on cumulative food intake over a period of 7 days was also determined. Mice that were administered the GLP-1 (Aib²A²²CexK⁴⁰)/Estrogen conjugates consumed the least amount of food.

[1310] FIG. 7b shows the effect of the GLP-1/Estrogen conjugates on changes in blood glucose (mg/dL). Mice that were administered the GLP-1 (Aib²A²²CexK⁴⁰)/Estrogen conjugates experienced the greatest change in blood glucose between days 0 and 7.

[1311] Neither the A22 or the d-amino acid containing peptides demonstrated much lowering relative to the GLP-1 (Aib²E¹⁶CexK⁴⁰)/Estrogen conjugates. Additionally, the estrogen conjugates of GLP-1 (Aib²E¹⁶CexK⁴⁰) were clearly more effective than the non-estrogen form of the same peptide.

### Example 19

[1312] Mice (N=8, average body weight 55 g) were administered subcutaneous injections once per day for one week with vehicle or one of the following:

[1313] (a) GLP-1 (Aib²E¹⁶CexK⁴⁰) (120 or 400 μg/kg-day),

[1314] (b) GLP-1 (Aib²E¹⁶CexK⁴⁰)/Estrogen(3-ester) (120 or 400 μg/kg-day),

[1315] (c) dGLP-1 (A¹Aib²A²²CexK⁴⁰) (400 or 1200 μg/kg-day), or

[1316] (d) dGLP-1 (A¹Aib²A²²CexK⁴⁰)/Estrogen(3-ester) (400 or 1200 μg/kg-day).

[1317] The d-amino acid containing peptides were clearly inferior in all measures of efficacy to the 1-amino acid containing peptides. Body weight was measured after 7 days and the change in body weight was determined (FIG. 8a). There was little apparent difference in body weight lowering at these doses for the peptides with and without the estrogen.

[1318] FIG. 8b shows the effect of the various GLP-1/Estrogen conjugates on changes in blood glucose levels (mg/dL). Mice that were administered the GLP-1 (Aib²E¹⁶CexK⁴⁰)/Estrogen(3-ester) conjugate experienced the greatest change in blood glucose levels between days 0 and 7 in vivo, far more than the animals treated with the same peptide but without estrogen. This demonstrated the direct improvement in blood glucose independent of a difference in body weight.

[1319] FIG. 8c illustrates the effect of the administration of the indicated GLP-1 conjugates on change in fat mass.

### Example 20

[1320] Diet induced obesity mice (DIO) (N=8, average body weight 61 g) were administered subcutaneous injections once per day for one or two weeks with vehicle or 40, 400, 1200, or 4000 μg/kg of one of the following:

[1321] (a) GLP-1 (Aib²E¹⁶CexK⁴⁰)/Estrogen(3-ether) (40 μg/kg-day),

[1322] (b) dGLP-1 (A¹Aib²A²²CexK⁴⁰) (4000 μg/kg-day),

[1323] (c) dGLP-1 (A¹Aib²A²²CexK⁴⁰)/Estrogen(3-ester) (400, 1200, 4000 μg/kg-day),

[1324] (d) GLP-1 (Aib²E¹⁶C²⁴(PEG-40 kDa)CexK⁴⁰) (40 μg/kg-day),

[1325] (e) GLP-1 (Aib²E¹⁶C²⁴(PEG-40 kDa)CexK⁴⁰)/Estrogen(3-ether) (40 μg/kg-day), or

[1326] (f) GLP-1 (Aib²E¹⁶C²⁴(PEG-40 kDa)CexK⁴⁰)/Cholesterol (40 μg/kg-day).

[1327] Body weight was measured after 7 days and the change in body weight was determined Mice that were administered the GLP-1/Estrogen(3-ester) conjugate experienced the greatest decrease in body weight (FIG. 9a) and the least amount of fat mass (FIG. 9b).

[1328] The effect of the GLP-1/Estrogen(3-ester) conjugates on cumulative food intake over a period of 7 days was also determined Mice that were administered a GLP-1 (Aib²E¹⁶Cex K⁴⁰)/Estrogen(3-ester) conjugate (without PEG) consumed significantly less food than mice that were administered GLP-1 alone.

[1329] FIG. 9c shows the effect of the GLP-1/Estrogen(3-ester) conjugates on the change in blood glucose. There was clear dose dependent glucose lowering in the d-amino acid containing GLP-1/Estrogen(3-ester) conjugate between days 0 and 7 and enhanced at the highest dose relative to mice that were administered GLP-1 alone (FIG. 9c)

### Example 21

[1330] Mice (N=8, 14 months old) that were on a diabetic diet were subcutaneously injected once a day for one week with vehicle or one of the following:

[1331] (a) d-GLP-1 (A¹Aib²A²²CexK⁴⁰)/Estrogen(3-ester) (1200, 4000 μg/kg),

[1332] (b) d-GLP-1 (A¹Aib²A²²CexK⁴⁰)/Estrogen(3-ether) (1200, 4000 μg/kg), or

[1333] (c) d-GLP-1 (Aib²E¹⁶K⁴⁰Cex) (4000 μg/kg),

[1334] Body weight was measured after 7 days and the change in body weight was determined (FIG. 10a). Mice that were administered the d-amino acid containing GLP-1/Estrogen conjugates where the estrogen was covalently linked as either a stable amide or ester that was unstable in vivo. The animals treated with the unstable ester conjugate experienced the greatest decrease in total body weight.

[1335] The effect of the GLP-1/estrogen conjugates on cumulative food intake over a period of 7 days was also determined. Mice that were administered the unstable ester conjugate consumed significantly less food than mice that were administered the remaining conjugates.

[1336] The effect of the GLP-1/estrogen conjugates on the change in blood glucose levels (mg/dL) was also determined. FIG. 10b illustrates that mice administered the d-amino acid containing GLP-1/Estrogen ester conjugate experienced a greater change in blood glucose levels between days 0 and 7 than mice that were administered a comparable d-amino acid containing peptide but with a stable estrogen conjugate.

### Example 22

### In Vitro Receptor Assays of Active GLP-1/Estrogen Conjugates

[1337] Serial dilutions of the following compounds were prepared:

[1338] (i) estradiol,

[1339] (ii) GLP-1,

[1340] (iii) an active, estrogen-stable GLP-1/Estrogen(3-ether) conjugate,

[1341] (iv) an active, estrogen-labile GLP-1/Estrogen(3-ester) conjugate,

[1342] (v) an active, estrogen-stable GLP-1/Estrogen(17-ester) conjugate,

[1343] (vi) an active, metastable, acid-labile GLP-1/Estrogen(17-hydrazone) conjugate,

[1344] (vii) an active, metastable, thiol reduction-labile GLP-1/Estrogen(17-carbamate disulfide) conjugate, and

[1345] (viii) an active, activated estrogen-labile GLP-1/Estrogen(3-ester, 17-OAc).

[1346] GLP-1 Activity (cAMP induction) —The serial dilutions of (ii), (iii), and (iv) were incubated with HEK293 cells co-transfected with the GLP-1 receptor and the luciferase gene fused to the cAMP response element (CRE). Luminescence was measured after cell lysis and incubation with luciferin. Results, shown in the below table, demonstrate that conjugation of GLP-1 to an estrogen does not influence GLP-1's inherent activity at the GLP-1 receptor.

[1347] GLP-1 Binding—The serial dilutions of (ii), (iii), and (iv) were incubated with GLP-1 receptor cell membrane extracts, [I125]-GLP-1, and agglutinin-coated SPA beads prior to scintillation measurement. Results, shown in the below table, demonstrate that conjugation of GLP-1 to an estrogen does not influence GLP-1's binding at the GLP-1 receptor.

| | GLP-1 | GLP-1 |
|---|---|---|
| Conjugate | EC₅₀ (nM) | IC₅₀ (nM) |
| GLP-1 | 0.011 ± 0.002 | 0.381 ± 0.043 |
| GLP-1/Estrogen(3-ether) | 0.012 ± 0.003 | 0.717 ± 0.135 |
| GLP-1/Estrogen(3-ester) | 0.014 ± 0.001 | 0.627 ± 0.046 |

[1348] Estrogen Activity—The serial dilutions of (i), (iii), and (iv) were incubated with T47D cells transfected with the luciferase gene fused to the estrogen response element (ERE). Luminescence was measured after cell lysis and incubation with luciferin. Results, shown in the below table, indicate that the stable attachment of estrogen to GLP-1 significantly reduces estrogen's intracellular estrogenic activity, while the labile conjugate demonstrates a high degree of intracellular estrogenic activity.

[1349] ERα Binding—The serial dilutions of (i), (iii), and (iv) were incubated with purified ERα and [I125]-estradiol. Following filtration, radio ligand binding was quantified by phosphor-imaging. Results, shown in the below table, indicate that the stable attachment of estrogen to GLP-1 significantly reduces estrogen's ability to bind to the estrogen receptor, while the labile conjugate demonstrates estrogen receptor binding, which is a function of the instability of the ester conjugate under the conditions of bioassay.

| | ERα | ERα |
|---|---|---|
| Conjugate | EC₅₀ (nM) | IC₅₀ (nM) |
| Estradiol | 0.004 ± 0.001 | 12.01 ± 1.832 |
| GLP-1/Estrogen(3-ether) | 108.2 ± 15.73 | 1200 ± 301.1 |
| GLP-1/Estrogen(3-ester) | 0.013 ± 0.001 | 198.0 ± 16.75 |

[1350] GLP-1 Activity (cAMP induction) —The serial dilutions of (ii), (iii), (iv), (v), (vi), (vii), and (viii) were incubated with HEK293 cells co-transfected with the GLP-1 receptor and the luciferase gene fused to the cAMP response element (CRE). Luminescence was measured after cell lysis and incubation with luciferin. The active, metastable GLP-1/estrogen conjugates were equally active at the GLP-1 receptor (FIG. 11a).

[1351] Estrogen Activity—The serial dilutions of (i), (iii), (iv), (v), (vi), (vii), and (viii) were incubated with T47D cells transfected with the luciferase gene fused to the estrogen response element (ERE). Luminescence was measured after cell lysis and incubation with luciferin. The active, metastable GLP-1/estrogen conjugates had variable activity at the estrogen receptor (FIG. 11b). When these active, metastable conjugates are purposefully treated with, for example, acid, thiol, or an enzyme (e.g., cathepsin), the metastable GLP-1/estrogen conjugates return to nearly full estrogen potency. Thus, the active, metastable GLP-1/estrogen conjugates exhibit reduced estrogenic activity as a covalent conjugate and require release to be active.

### Example 23

### In Vitro Receptor Assays of Inactive GLP-1/Estrogen Conjugates

[1352] Serial dilutions of the following compounds were prepared:

[1353] (i) inactive GLP-1,

[1354] (ii) an inactive, estrogen-stable GLP-1/Estrogen(3-ether) conjugate, and

[1355] (iii) an inactive, estrogen-labile GLP-1/Estrogen(3-ester) conjugate.

[1356] GLP-1 Activity (cAMP induction) —The serial dilutions of (i), (ii), and (iii) were incubated with HEK293 cells co-transfected with the GLP-1 receptor and the luciferase gene fused to the cAMP response element (CRE). Luminescence was measured after cell lysis and incubation with luciferin. Results are shown in the below table.

| | GLP-1 |
|---|---|
| Conjugate | EC₅₀ (nM) |
| Active GLP-1 | 0.028 ± 0.001 |
| Inactive GLP-1 (d-amino acid containing) | 480.5 ± 12.76 |
| Inactive GLP-1 (d-amino acid containing)/ | 562.2 ± 26.87 |
| Estrogen(3-ester) | |
| Inactive GLP-1 (d-amino acid containing)/ | 418.3 ± 16.75 |
| Estrogen(3-ether) | |

### Example 24

[1357] Diet induced obesity mice (DIO) (N=8, average body weight 51 g) were administered subcutaneous injections once per day for two weeks with vehicle or 400 or 4000 μg/kg of one of the following:

[1358] (a) d-amino acid containing GLP-1 (A¹Aib²E¹⁶K⁴⁰Cex) (4000 μg/kg),

[1359] (b) d-amino acid containing GLP-1 (A¹Aib²A²²CexK⁴⁰)/Estrogen(3-ester) (400, 4000 μg/kg), or

[1360] (c) d-amino acid containing GLP-1 (A¹Aib²A²²CexK⁴⁰)/Estrogen (3-ether) (400, 4000 μg/kg).

[1361] Body weight was measured after 15 days and the change in body weight was determined Mice that were administered the inactive, estrogen-labile d-amino acid containing GLP-1/Estrogen(3-ester) conjugate experienced the greatest decrease in body weight, with the effect more pronounced at a high dose (FIG. 12a).

[1362] The effect of inactive GLP-1 and the inactive GLP-1/Estrogen conjugates on cumulative food intake over a period of 15 days was also determined. Mice that were administered the inactive, estrogen-labile d-amino acid containing GLP-1/Estrogen(3-ester) conjugate consumed significantly less food than mice that were administered inactive GLP-1 alone or an inactive, estrogen-stable d-amino acid containing GLP-1/Estrogen(3-ether) conjugate, with the effect more pronounced at a high dose (FIG. 12b).

[1363] FIG. 12c shows the effect of inactive GLP-1 and the inactive d-amino acid containing GLP-1/Estrogen conjugates on the change in blood glucose. A high dose of inactive d-amino acid containing GLP-1/Estrogen(3-ester) conjugate lowered blood glucose between days 0 and 14.

[1364] Liver weight was measured after 15 days and the change in liver weight was determined Mice that were administered the estrogen-labile, inactive d-amino acid containing GLP-1/Estrogen(3-ether) conjugate experienced a greater decrease in liver weight than mice that were administered the estrogen-stable, inactive d-amino acid containing GLP-1/Estrogen(3-ester) conjugate (FIG. 12d).

[1365] Uterus weight was measured after 15 days and the change in uterus weight was determined Mice that were administered the inactive, estrogen-labile d-amino acid containing GLP-1/Estrogen(3-ester) conjugate experienced a significantly greater increase in uterus weight than mice that were administered inactive GLP-1 alone or the inactive, estrogen-stable d-amino acid containing GLP-1/Estrogen(3-ether) conjugate (FIG. 12e).

### Example 25

[1366] C57BI/6 mice (N=8, average body weight 19.6 g) on a standard chow diet were ovariectomized and allowed 5 days for recovery prior to subcutaneous administration injections once per day for 7 days with vehicle or 4000 μg/kg of one of the following:

[1367] (a) GLP-1 agonist,

[1368] (b) d-amino acid containing GLP-1 (A¹Aib²A²²CexK⁴⁰)/Estrone(3-ester),

[1369] (c) d-amino acid containing GLP-1 (A¹Aib²A²²CexK⁴⁰)/Estrogen(3-ether), or

[1370] (d) GLP-1 agonist/Estrogen(3-ether).

[1371] Mice were sacrificed at the end of the study and the uterus was collected and weighed.

[1372] Body weight was measured after 7 days and the change in body weight was determined Mice that were administered the active, estrogen-stable GLP-1 agonist/Estrogen(3-ether) conjugate experienced a greater decrease in body weight than mice that were administered the active, GLP-1 agonist alone (FIG. 13a), the inactive, estrogen-labile d-amino acid containing GLP-1/Estrone(3-ester) conjugate, or the inactive, estrogen-stable d-amino acid containing GLP-1/Estrogen(3-ether) conjugate. Mice that were administered the GLP-1 agonist, the inactive, estrogen-labile d-amino acid containing GLP-1/Estrone(3-ester) conjugate, and the active, estrogen-stable GLP-1 agonist/Estrogen(3-ether) conjugate exhibited a decrease in fat mass (FIG. 13b).

[1373] The effect of the GLP-1 conjugates on cumulative food intake over a period of 7 days was also determined Mice that were administered the active, estrogen-stable GLP-1 agonist/Estrogen(3-ether) conjugate consumed less food than mice that were administered the active, GLP-1 agonist alone, the inactive, estrogen-labile d-amino acid containing GLP-1/Estrone(3-ester) conjugate, or the inactive, estrogen-stable d-amino acid containing GLP-1/Estrogen(3-ether) conjugate (FIG. 13c).

[1374] FIG. 13d shows the effect of the GLP-1 conjugates on the change in blood glucose. Mice that were administered the inactive, estrogen-labile inactive d-amino acid containing GLP-1/Estrone(3-ester) conjugate or the active, stable GLP-1 agonist/Estrogen(3-ether) conjugate experienced a decrease in blood glucose levels greater than vehicle. Mice that were administered the inactive, estrogen-stable d-amino acid containing GLP-1/Estrogen(3-ether) conjugate did not exhibit a decrease in blood glucose levels.

[1375] Uterus weight was measured after 7 days and the change in uterus weight was determined Mice that were administered the inactive, estrogen-labile d-amino acid containing GLP-1/Estrone(3-ester) conjugate experienced a significantly greater increase in uterus weight than mice that were administered GLP-1 alone, the inactive, estrogen-stable d-amino acid containing GLP-1/Estrogen(3-ether) conjugate, or the active, estrogen-stable GLP-1/Estrogen(3-ether) conjugate (FIG. 13e).

### Example 26

[1376] Mice (N=8, average body weight 19.1 g) on a standard chow diet were ovariectomized and allowed 5 days for recovery prior to subcutaneous administration injections once per day for 7 days with vehicle or 4000 μg/kg of one of the following:

[1377] (a) GLP-1 agonist/Estrone(3-ester),

[1378] (b) GLP-1 agonist/Estrogen(17-carbamate disulfide),

[1379] (c) GLP-1 agonist/Estrogen(17-hydrazone), or

[1380] (d) GLP-1 agonist/Estrogen(17-cathepsin).

[1381] Mice were sacrificed at the end of the study and the uterus was collected and weighed.

[1382] Body weight was measured after 7 days and the change in body weight was determined Mice that were administered the metastable GLP-1 agonist/Estrogen conjugates experienced a greater decrease in body weight and fat mass than mice that were administered the active, GLP-1 agonist alone or the active, estrogen-labile GLP-1 agonist/Estrone(3-ester) conjugate (FIGS. 14a and 14b). Mice that were administered the metastable enzyme- and acid-labile conjugates, GLP-1 agonist/Estrogen(17-cathepsin) and GLP-1 agonist/Estrogen(17-hydrazone), respectively, initially had the greatest decrease in body weight, while the metastable thiol reduction-labile conjugate, GLP-1 agonist/Estrogen(17-carbamate disulfide), exhibited the overall greatest decrease in body weight over the 7 day study.

[1383] FIG. 14c shows the effect of the metastable GLP-1 conjugates on the change in blood glucose. Mice that were administered the metastable thiol reduction- and acid-labile conjugates, GLP-1 agonist/Estrogen(17-carbamate disulfide) and GLP-1 agonist/Estrogen(17-hydrazone), respectively, experienced a greater decrease in blood glucose levels over the course of the study than the labile GLP-1 agonist/Estrone(3-ester) conjugate.

[1384] Uterus weight was measured after 7 days and the change in uterus weight was determined Mice that were administered the estrogen-labile GLP-1/Estrone(3-ester) conjugate experienced a significantly greater increase in uterus weight than mice that were administered metastable GLP-1/Estrogen conjugates (FIG. 14d).

### Example 27

[1385] Diet induced obesity mice were administered subcutaneous injections once per day for two weeks with vehicle or 40 or 400 μg/kg of one of the following:

[1386] (a) GLP-1 agonist,

[1387] (b) GLP-1 agonist/Estrogen(3-ester), or

[1388] (c) GLP-1 agonist/Estrogen(3-ether).

[1389] Body weight was measured after 15 days and the change in body weight was determined Mice that were administered the active, estrogen-stable GLP-1 agonist/Estrogen(3-ether) conjugate experienced a significantly greater decrease in body weight than mice that were administered the active, GLP-1 agonist alone or the active, estrogen-labile GLP-1 agonist/Estrogen(3-ester) conjugate (FIG. 15a).

[1390] The effect of active GLP-1 and the active GLP-1/Estrogen conjugates on cumulative food intake over a period of 15 days was also determined Mice that were administered the active, estrogen-stable GLP-1 agonist/Estrogen(3-ether) conjugate consumed significantly less food than mice that were administered the active, GLP-1 agonist alone or the active, estrogen-labile GLP-1 agonist/Estrogen(3-ester) conjugate (FIG. 15b).

### Example 28

### Stability Analysis of GLP-1/Estrogen Conjugates

[1391] Peptide conjugates (1 mg/mL) were incubated in 100% human plasma at pH 7.4 and 37° C. Aliquots were withdrawn and plasma proteins were precipitated and removed by micro-centrifugation. The aliquots were analyzed by HPLC and MS, as described in Example 1. The active estrogen-stable GLP-1/Estrogen(3-ether) conjugates (e.g., Example 3) exhibited no estrogen release over 72 hours, while the active estrogen-labile GLP-1/Estrogen(3-ester) conjugates (e.g., Example 6) showed substantial estrogen release after 3 hours and complete estrogen release within 6 hours (FIG. 16a). The acid-labile conjugate, GLP-1/Estrogen(17-hydrazone) (e.g., Example 7) exhibited no estrogen release in plasma over 48 hours at physiological pH, but released estrogen within 3 hours upon exposure to acid (pH 5.0), with complete estrogen release occurring within 6 hours (FIG. 16b). The unhindered thiol reduction-labile conjugate (e.g., Example 9) showed substantial estrogen release after 24 hours and complete estrogen release within 48 hours, while the hindered thiol reduction-labile conjugate, GLP-1/Estrogen(17-carbamate disulfide) (e.g., Example 9), exhibited no estrogen release in plasma over 72 hours (FIG. 16c). This hindered thiol reduction-labile conjugate also exhibited no estrogen release at an extracellular concentration of glutathione (e.g., 15 μM), but released estrogen within 6 hours at an intracellular glutathione concentration of 15 mM (FIG. 16d). The enzyme-labile GLP-1/Estrogen(cathepsin) conjugate (e.g., Example 10) exhibited no estrogen release in plasma over 72 hours (FIG. 16e).

### Example 29

[1392] Diet-induced obesity mice were administered subcutaneous injections once per day for seven days with vehicle or 400 μg/kg of one of the following:

[1393] (a) GLP-1 agonist,

[1394] (b) GLP-1 agonist/Estrogen(3-ether),

[1395] (c) GIP agonist,

[1396] (d) GIP agonist/Estrogen(3-ether),

[1397] (e) Glucagon agonist, or

[1398] (f) Glucagon agonist/Estrogen(3-ether).

[1399] Body weight was measured after 7 days and the change in body weight was determined (FIG. 17a). Mice that were administered the GLP-1 agonist/Estrogen(3-ether) conjugate experienced the greatest decrease in body weight, and a significantly greater decrease in body weight than mice that were administered the GLP-1 agonist alone. Mice that were administered the GIP agonist alone and the GIP agonist/Estrogen(3-ether) conjugate showed similar decreases in body weight. Mice that were administered the GIP agonist and the GIP agonist/Estrogen(3-ether) conjugate exhibited a greater decrease in body weight than mice that were administered vehicle. Mice that were administered the glucagon agonist alone and the glucagon agonist/Estrogen(3-ether) conjugate showed similar decreases in body weight. The decrease in body weight of mice that were administered the glucagon agonist or the glucagon agonist/Estrogen(3-ether) conjugate was similar to the decrease in body weight in mice that were administered vehicle. Without intending to be bound by any particular theory, peptides that target the GLP-1 receptor show superior ability to target estrogen to cell(s) where it can make a meaningful difference on body weight. In this experiment, conjugates to GLP-1 active peptides (GLP-1 agonists) performed better with respect to reducing body weight than peptides that primarily target the GIP or glucagon receptors (GIP agonists or glucagon agonists).

[1400] The effect of the conjugates on cumulative food intake was also determined (FIG. 17b). Mice that were administered the estrogen conjugates of GLP-1, GIP, and glucagon consumed less food than mice that were administered the GLP-1 agonist, GIP agonist, or glucagon agonist, respectively. Mice that were administered the GLP-1 agonist/Estrogen(3-ether) conjugate consumed the least amount of food over the 7 day period.

[1401] The effect of the conjugates on the change in blood glucose was also determined. Mice that were administered the GLP-1 agonist and the GLP-1 agonist/Estrogen(3-ether) conjugate both showed a decrease in blood glucose levels over 7 days, with the decrease greater in mice that were administered the conjugate. Mice that were administered the GIP agonist and the GIP agonist/Estrogen(3-ether) conjugate also showed a decrease in blood glucose levels over 7 days. Mice that were administered the glucagon agonist showed an increase in blood glucose levels over 7 days, while mice that were administered the glucagon agonist/Estrogen(3-ether) conjugate showed a decrease in blood glucose levels over 7 days (FIG. 17c).

### Example 30

[1402] Diet-induced obesity wild type mice, estrogen receptor beta knock-out (ERβ KO) mice, and estrogen receptor alpha knock-out (ERα KO) mice were administered subcutaneous injections once per day for two weeks with vehicle or 400 μg/kg of one of the following:

[1403] (a) GLP-1 agonist, or

[1404] (b) GLP-1 agonist/Estrogen(3-ether).

[1405] Body weight was measured after 14 days and the change in body weight was determined (FIG. 18a). Wild type mice that were administered the GLP-1 agonist/Estrogen(3-ether) conjugate showed a greater decrease in body weight over mice that were administered vehicle or the GLP-1 agonist. Wild type mice that were administered vehicle showed about a 10% increase in body weight over the two week period, about a 3% increase in body weight when administered the GLP-1 agonist, and about a 10% decrease in body weight when administered the GLP-1 agonist/Estrogen(3-ether) conjugate. ERα KO mice that were administered the GLP-1 agonist/Estrogen(3-ether) conjugate showed a greater decrease in body weight than when administered vehicle or the GLP-1 agonist. ERα KO mice showed no change in body weight when administered vehicle, about a 10% decrease in body weight when administered the GLP-1 agonist, and about a 20% decrease in body weight when administered the GLP-1 agonist/Estrogen(3-ether) conjugate. ERβ KO mice that were administered the GLP-1 agonist/Estrogen(3-ether) conjugate showed a similar decrease in body weight than mice that were administered the GLP-1 agonist. ERβ KO mice showed about a 2% decrease in body weight when administered vehicle, and about a 15% decrease in body weight when administered either the GLP-1 agonist or the GLP-1 agonist/Estrogen(3-ether) conjugate. Without intending to be bound by any particular theory, these data suggest that the ERβ receptor is responsible for an additional lowering of body weight. When the ERβ receptor is knocked out, the mice do not show a difference in body weight lowering between the GLP-1 agonist and the GLP-1 agonist/Estrogen(3-ether) conjugate.

[1406] The effect of the GLP-1 conjugates on cumulative food intake in the wild type mice and the knock-out mice was also determined (FIG. 18b). The knock-out mice that were administered the GLP-1 agonist/Estrogen(3-ester) conjugate consumed the least amount of food.

[1407] The effect of the GLP-1 conjugates on the change in blood glucose in the wild type mice and the knock-mice was also determined. ERα KO mice that were administered the GLP-1 agonist/Estrogen(3-ester) conjugate showed the greatest decrease in blood glucose levels (FIG. 18c).

### Example 31

[1408] Male db/db mice with blood glucose levels of 500 mg/dl were administered a subcutaneous dose of vehicle or 50 nmol/kg of one of the following:

[1409] (a) GLP-1 agonist,

[1410] (b) GLP-1 agonist/Estrogen(3-ether), or

[1411] (c) GLP-1 agonist/Estrogen(3-ester).

[1412] Mice that were administered the GLP-1 agonist showed the least effective lowering of blood glucose over 48 hours (except for vehicle), while mice that were administered the estrogen-stable GLP-1 agonist/Estrogen(3-ether) conjugate showed the most effective decrease in blood glucose over 48 hours (FIG. 19).

[1413] The results of the above experiments were consistent when a streptozotocin (STZ)-induced diabetes model, a model of type I diabetes, was used.

1. A compound comprising the structure Q-L-Y;
wherein Q is a glucagon superfamily peptide;
Y is a NHR ligand which activates a nuclear hormone receptor with an EC₅₀ of about 1 μM or less, and has a molecular weight of up to about 1000 daltons; and
L is a linking group or a bond.

2. The compound of claim 1, wherein Q exhibits at least 0.1% of the activity of native GLP-1 at the GLP-1 receptor, at least 0.1% of the activity of native glucagon at the glucagon receptor, or at least 0.1% of the activity of native GIP at the GIP receptor, or a combination thereof.

3. (canceled)

4. (canceled)

5. The compound of claim 1, wherein Q has an EC₅₀ at the GLP-1 receptor within 10-fold of the EC₅₀ of Y at the nuclear hormone receptor an EC₅₀ at the glucagon receptor within 10-fold of the EC₅₀ of Y at the nuclear hormone receptor, or an EC₅₀ at the GIP receptor within 10-fold of the EC₅₀ of Y at the nuclear hormone receptor, or a combination thereof.

6. (canceled)

7. (canceled)

8. The compound of claim 1, wherein Y is a NHR ligand that acts at a Type I or a Type II nuclear hormone receptor.

9. The compound of claim 8, wherein Y is a NHR ligand that acts at a nuclear hormone receptor selected from the group consisting of an estrogen receptor, a glucocorticoid receptor, a mineralcorticoid receptor, a progesterone receptor, an androgen receptor, a thyroid hormone receptor, a retinoic acid receptor, a peroxisome proliferators activated receptor, a liver X receptor, a farnesoid X receptor, a vitamin D receptor, a RAR-related orphan receptor, and a pregnane X receptor.

10. (canceled)

11. (canceled)

12. The compound of claim 9, wherein Y is selected from the group consisting of fatty acids and derivatives thereof, bile acids and derivatives thereof, cholesterol and derivatives thereof, and steroids and derivatives thereof.

13. The compound of claim 12, wherein Y is selected from the group consisting of estradiol and derivatives thereof, estrone and derivatives thereof, testosterone and derivatives thereof, and cortisol and derivatives thereof.

14. The compound of claim 9, wherein L is stable in vivo, hydrolyzable in vivo, or metastable in vivo.

15. (canceled)

16. (canceled)

17. The compound of claim 14, wherein L comprises an ether moiety, or an amide moiety, an ester moiety, an acid-labile moiety, a reduction-labile moiety, an enzyme-labile moiety, a hydrazone moiety, a disulfide moiety, or a cathepsin-cleavable moiety.

18. (canceled)

19. (canceled)

20. (canceled)

21. The compound of claim 9, wherein Q comprises
(I) an amino acid sequence at least 50% identical to native glucagon that retains the alpha-helix conformation of the amino acids corresponding to amino acids 12-29 of native glucagon (SEQ ID NO: 1601);
(II) an amino acid sequence at least 50% identical to native GLP-1 that retains the alpha-helix conformation of the amino acids corresponding to amino acids 12-29 of native GLP-1 (SEQ ID NO: 1603); or
(III) the amino acid sequence:
X₁-X₂-Gln-Gly-Thr-Phe-Thr-Ser-Asp-Tyr-Ser-Lys-Tyr-Leu-Asp-Ser-Arg-Arg-Ala-Gln-Asp-Phe-Val-Gln-Trp-Leu-Met-Z (SEQ ID NO: 839) with 1 to 3 amino acid modifications thereto,
(a) wherein X₁ and/or X₂ is a non-native amino acid (relative to SEQ ID NO: 1601) that reduces susceptibility of the glucagon peptide to cleavage by dipeptidyl peptidase IV (DPP-IV),
(b) wherein Z is selected from the group consisting of —COOH, -Asn-COOH, Asn-Thr-COOH, and W—COOH, wherein W is 1 to 2 amino acids or GPSSGAPPPS,
(c) wherein Q comprises a modification selected from the group consisting of:
(i) a lactam bridge between the side chains of amino acids at positions i and i+4, wherein i is 12, 16, 20 or 24, and
(ii) one, two, three, or all of the amino acids at positions 16, 20, 21, and 24 of the glucagon peptide is substituted with an α,α-disubstituted amino acid;
wherein Q exhibits glucagon agonist activity.

22. (canceled)

23. (canceled)

24. The compound of claim 21, wherein Q comprises the amino acid sequence of SEQ ID NO: 1601 and comprises:
(a) at least one amino acid modification selected from the group consisting of:
(i) substitution of Thr at position 29 with a charged amino acid;
(ii) substitution of Thr at position 29 with a charged amino acid selected from the group consisting of Lys, Arg, H is, Asp, Glu, cysteic acid, and homocysteic acid;
(iii) substitution at position 29 with Asp, Glu, or Lys;
(iv) substitution at position 29 with Glu;
(v) insertion after position 29 of 1 to 3 charged amino acids;
(vi) insertion after position 29 of Glu or Lys;
(vii) insertion after position 29 of Gly-Lys, or Lys-Lys;
(viii) substitution of Gln at position 3 with an amino acid comprising a side chain of Structure I, II, or III: [chemical structure]
wherein R¹ is C₀₋₃ alkyl or C₀₋₃ heteroalkyl; R² is NHR⁴ or C₁₋₃ alkyl; R³ is C₁₋₃ alkyl; R⁴ is H or C₁₋₃ alkyl; X is NH, O, or S; and Y is NHR⁴, SR³, or OR³; and
(ix) a combination thereof;
(b) substitution of Ser at position 16 with Thr, Glu, or Aib; and at least one amino acid modification selected from the group consisting of:
(i) substitution of His at position 1 with a non-native amino acid that reduces susceptibility of the glucagon peptide to cleavage by dipeptidyl peptidase IV (DPP-IV),
(ii) substitution of Ser at position 2 with a non-native amino acid that reduces susceptibility of the glucagon peptide to cleavage by dipeptidyl peptidase IV (DPP-IV),
(iii) substitution of Thr at position 7 with Ile, Abu, or Val;
(iv) substitution of Gln at position 20 with Ser, Thr, Ala, Aib, Arg, or Lys;
(v) substitution of Met at position 27 with Leu or Nle;
(vi) deletion of amino acids at positions 28-29;
(vii) deletion of the amino acid at positions 29;
(viii) addition of the amino acid sequence GPSSGAPPPS to the C-terminus; and
(ix) addition of the amino acid sequence GPSSGAPPPSX to the C-terminus, wherein X is any amino acid; and
(x) a combination thereof;
wherein Q exhibits glucagon agonist activity.

25. The compound of claim 21, wherein
(I) Q comprises a glucagon related peptide of SEQ ID NO: 1601, with the following modifications:
(a) an amino acid modification at position 1 that confers GIP agonist activity,
(b) a modification selected from the group consisting of:
(i) a lactam bridge between the side chains of amino acids at positions i and i+4 or between the side chains of amino acids at positions j and j+3, wherein i is 12, 13, 16, 17, 20 or 24, and wherein j is 17, and
(ii) one, two, three, or all of the amino acids at positions 16, 20, 21, and 24 of the analog is substituted with an α,α-disubstituted amino acid,
(c) 1-10 further amino acid modifications;
wherein Q exhibits activity at the GIP receptor;
(II) Q comprises the amino acid sequence:
X₁-X₂-Gln-Gly-Thr-Phe-Thr-Ser-Asp-X₃-Ser-X₄-Tyr-Leu-X₅-X₆-X₇-X₈-Ala-X₉-X₁₀-Phe-X₁₁-X₁₂-Trp-Leu-X₁₃-X₁₄-X₁₅ (SEQ ID NO: 55), or an analog thereof, wherein said analog differs from SEQ ID NO: 55 by 1 to 3 amino acid modifications, selected from positions 1, 2, 3, 5, 7, 10, 11, 13, 14, 17, 18, 19, 21, and 25, wherein:
(a) X₁ is H is, D-His, (Des-amino)His, hydroxyl-His, acetyl-His, homo-His, or alpha, alpha-dimethyl imidazole acetic acid (DMIA), N-methyl His, alpha-methyl His, or imidazole acetic acid;
(b) X₂ is Ser, D-Ser, Ala, D-Ala, Val, Gly, N-methyl Ser, aminoisobutyric acid (Aib) or N-methyl Ala;
(c) X₃, X₄, X₅, X₁₀, X₁₁ and X₁₄ are, individually, any amino acid;
(d) X₆ is Ser, Glu, Gln, homoglutamic acid or homocysteic acid;
(e) X₇ is Arg, Gln, Lys, Cys, Orn, homocysteine or acetyl phenylalanine;
(f) X₈ is Arg, Ala, Lys, Cys, Orn, homocysteine or acetyl phenyalanine;
(g) X₉ is Gln, Lys, Arg, Orn or Citrulline;
(h) X₁₂ is Ala, Gln, Glu, Lys, Cys, Orn, homocysteine or acetyl phenyalanine;
(i) X₁₃ is Met, Leu or Nle;
j) X₁₅ is Thr, Gly, Lys, Cys, Orn, homocycsteine or acetyl phenyalanine; and
optionally comprises one of the following modifications:
(a) deletion of amino acids at positions 28-29;
(b) deletion of the amino acid at positions 29;
(c) addition of the amino acid sequence GPSSGAPPPS to the C-terminus; and
(d) addition of the amino acid sequence GPSSGAPPPSX to the C-terminus, wherein X is any amino acid; and
(e) a combination thereof; or
(III) Q comprises an amino acid sequence that differs from SEQ ID NO: 1601 by no more than ten amino acid modifications, comprising:
(a) one or more amino acid substitutions with Aib at positions 16, 20, 21, and/or 24, and
(b) an amino acid modification at position 1 and/or 2 that provides reduced susceptibility to cleavage by dipeptidyl peptidase IV, and
optionally comprising one or more of the following modifications:
(a) deletion of amino acids at positions 28 and 29,
(b) deletion of the amino acid at position 29,
(c) addition of the amino acid sequence GPSSGAPPPS to the C-terminus,
(d) addition of the amino acid sequence GPSSGAPPPSX to the C-terminus, wherein X is any amino acid,
(e) substitution of the C-terminal carboxyl group with an amide or carboxylic ester, and
wherein Q exhibits GLP-1 agonist activity and glucagon agonist activity.

26. The compound of claim 25, wherein the 1-10 further amino acid modifications in (I) are selected from the group consisting of:
(i) substitution of serine at position 2 with D-Ser, Ala, D-Ala, Gly, N-methyl-Ser, Aib, Val, or ε-amino-N-butyric acid;
(ii) substitution of serine at position 16 with Glu, Gln, homoglutamic acid, homocysteic acid, Thr, Gly, or Aib;
(iii) substitution of glutamine at position 20 with Ser, Thr, Ala, Lys, Citrulline, Arg, Orn, or Aib;
(iv) substitution of methionine at position 27 with Leu;
(v) substitution of arginine at position 28 with Ala;
(vi) substitution of threonine at position 29 with Gly;
(vii) a conservative substitution at any of positions 2, 5, 9, 10, 11, 12, 13, 14, 15, 16, 17, 18, 20, 21, 24, 27, 28, and 29;
(viii) addition of 1-21 amino acids to the C-terminus
(ix) addition of the amino acid sequence GPSSGAPPPS to the C-terminus,
(x) addition of the amino acid sequence GPSSGAPPPSX to the C-terminus, wherein X is any amino acid,
(xi) substitution of the C-terminal carboxyl group with an amide or carboxylic ester, and
(xii) a combination thereof.

27. (canceled)

28. (canceled)

29. The compound of claim 9, wherein L-Y is covalently conjugated to the N-terminus, C-terminus, or an amino acid side chain of Q.

30. The compound of claim 9, wherein L-Y is conjugated to an amino acid side chain of Q that corresponds to position 10, 30, 37, 38, 39, 40, 41, 42, or 43 of native glucagon (SEQ ID NO: 1601) or a sequence comprising native glucagon.

31. (canceled)

32. A prodrug of the compound of claim 9 comprising the structure A-B, wherein
A is an amino acid or a hydroxy acid;
B is an N-alkylated amino acid linked to Q through an amide bond between a carboxyl moiety of B and an amine of Q;
A, B, or the amino acid of Q to which A-B is linked is a non-coded amino acid, further wherein the chemical cleavage half-life (t_{1/2}) of A-B from Q is at least about 1 hour to about 1 week in PBS under physiological conditions.

33. The compound of claim 32, wherein A-B comprises the structure: [chemical structure]
wherein
(a) R¹, R², R⁴ and R⁸ are independently selected from the group consisting of H, C1-C18 alkyl, C2-C18 alkenyl, (C1-C18 alkyl)OH, (C1-C18 alkyl)SH, (C2-C3 alkyl)SCH₃, (C1-C4 alkyl)CONH₂, (C1-C4 alkyl)COOH, (C1-C4 alkyl)NH₂, (C1-C4 alkyl)NHC(NH₂⁺)NH₂, (C0-C4 alkyl)(C3-C6 cycloalkyl), (C0-C4 alkyl)(C2-C5 heterocyclic), (C0-C4 alkyl)(C6-C10 aryl)R⁷, (C1-C4 alkyl)(C3-C9 heteroaryl), and C1-C12 alkyl(W1)C1-C12 alkyl, wherein W1 is a heteroatom selected from the group consisting of N, S and O, or
(ii) R¹ and R² together with the atoms to which they are attached form a C3-C12 cycloalkyl or aryl; or
(iii) R⁴ and R⁸ together with the atoms to which they are attached form a C3-C6 cycloalkyl;
(b) R³ is selected from the group consisting of C1-C18 alkyl, (C1-C18 alkyl)OH, (C1-C18 alkyl)NH₂, (C1-C18 alkyl)SH, (C0-C4 alkyl)(C3-C6)cycloalkyl, (C0-C4 alkyl)(C2-C5 heterocyclic), (C0-C4 alkyl)(C6-C10 aryl)R⁷, and (C1-C4 alkyl)(C3-C9 heteroaryl) or R⁴ and R³ together with the atoms to which they are attached form a 4, 5 or 6 member heterocyclic ring;
(c) R⁵ is NHR⁶ or OH;
(d) R⁶ is H, C₁-C₈ alkyl or R⁶ and R² together with the atoms to which they are attached form a 4, 5 or 6 member heterocyclic ring; and
(e) R⁷ is selected from the group consisting of H and OH.

34. The compound of claim 9, further comprising an amino acid side chain on Q covalently attached to an acyl group or an alkyl group via an alkyl amine, amide, ether, ester, thioether, or thioester linkage, which acyl group or alkyl group is non-native to a naturally occurring amino acid.

35. The compound of claim 34, wherein the amino acid to which the acyl or alkyl group is attached is at a position corresponding to position 10, 20, 24, 30, 37, 38, 39, 40, 41, 32, or 43 of a sequence comprising native glucagon, or the C-terminal amino acid.

36. (canceled)

37. The compound of claim 35, wherein the acyl group or the alkyl group is attached to the side chain of the amino acid through a spacer.

38. (canceled)

39. The compound of claim 9, wherein Q is covalently attached to one or more heterologous moieties.

40. (canceled)

41. The compound of claim 9 wherein Q is selected from the group consisting of SEQ ID NOs: 1-564, 566-570, 573-575, 577, 579-580, 585-612, 616, 618-632, 634-642, 647, 657-692, 694-695, 715-718, 722, 724-725, 729, 731-760, 801-878, 883-919, 1001-1275, 1301-1371, 1401-1518, and 1601-1650.

42. (canceled)

43. A pharmaceutical composition comprising the compound of claim 9 and a pharmaceutically acceptable carrier.

44. A method for treating a disease or medical condition in a patient, wherein the disease or medical condition is selected from the group consisting of metabolic syndrome, diabetes, obesity, liver steatosis, and a neurodegenerative disease, comprising administering to the patient the pharmaceutical composition of claim 43 in an amount effective to treat the disease or medical condition.

The application's sequence listing, which the Patent Office published only in electronic form, follows.

SEQUENCE LISTING (1668 sequences)

SEQ ID NO: 1 - protein, 29 aa, Homo sapiens
HSQGTFTSDYSKYLDSRRAQDFVQWLMNT

SEQ ID NO: 2 - protein, 29 aa, Artificial Sequence
  Synthetic Glucagon Analogue
  MOD_RES (16)..(16): Glu, Gln, homoglutamic acid or homocysteic acid
  MOD_RES (17)..(17): Arg, Cys, Orn, homocysteine or acetyl phenylalanine
  MOD_RES (27)..(27): Met, Leu or Nle
HSQGTFTSDYSKYLDXXRAQDFVQWLXNT

SEQ ID NO: 3 - protein, 29 aa, Artificial Sequence
  Synthetic Glucagon Analogue
  MOD_RES (16)..(16): Glu, Gln, homoglutamic acid or homocysteic acid
  MOD_RES (21)..(21): Asp, Cys, Orn, homocysteine or acetyl phenyalanine
  MOD_RES (27)..(27): Met, Leu or Nle
HSQGTFTSDYSKYLDXRRAQXFVQWLXNT

SEQ ID NO: 4 - protein, 29 aa, Artificial Sequence
  Synthetic Glucagon Analogue
  MOD_RES (16)..(16): Glu, Gln, homoglutamic acid or homocysteic acid
  MOD_RES (24)..(24): Gln, Cys, Orn, homocysteine or acetyl phenylalanine
  MOD_RES (27)..(27): Met, Leu or Nle
HSQGTFTSDYSKYLDXRRAQDFVXWLXNT

SEQ ID NO: 5 - protein, 29 aa, Artificial Sequence
  Synthetic Glucagon Analogue
  MOD_RES (16)..(16): Glu, Gln, homoglutamic acid or homocysteic acid
  MOD_RES (21)..(21): Asp, Cys, Orn, homocysteine or acetyl phenyalanine
  MOD_RES (24)..(24): Gln, Cys, Orn, homocysteine or acetyl phenyalanine
  MOD_RES (27)..(27): Met, Leu or Nle
HSQGTFTSDYSKYLDXRRAQXFVXWLXNT

SEQ ID NO: 6 - protein, 29 aa, Artificial Sequence
  Synthetic Glucagon Analogue
  MOD_RES (21)..(21): Asp, Cys, Orn, homocysteine or acetyl phenyalanine
  MOD_RES (27)..(27): Met, Leu or Nle
HSQGTFTSDYSKYLDERRAQXFVQWLXNT

SEQ ID NO: 7 - protein, 29 aa, Artificial Sequence
  Synthetic Glucagon Analogue
  MOD_RES (24)..(24): Gln, Cys, Orn, homocysteine or acetyl phenylalanine
  MOD_RES (27)..(27): Met, Leu or Nle
HSQGTFTSDYSKYLDERRAQDFVXWLXNT

SEQ ID NO: 8 - protein, 29 aa, Artificial Sequence
  Synthetic Glucagon Analogue
  MOD_RES (16)..(16): Glu, Gln, homoglutamic acid or homocysteic acid
HSQGTFTSDYSKYLDXRRAQDFVQWLMNT

SEQ ID NO: 9 - protein, 29 aa, Artificial Sequence
  Synthetic Glucagon Analogue
  MOD_RES (27)..(27): Met, Leu or Nle
HSQGTFTSDYSKYLDERRAQDFVQWLXNT

SEQ ID NO: 10 - protein, 29 aa, Artificial Sequence
  Synthetic Glucagon Analogue
HSQGTFTSDYSKYLDERRAQDFVQWLMNT

SEQ ID NO: 11 - protein, 29 aa, Artificial Sequence
  Synthetic Glucagon Analogue
  MISC_FEATURE: c-term amidation
HSQGTFTSDYSKYLDERRAQDFVQWLMNT

SEQ ID NO: 12 - protein, 29 aa, Artificial Sequence
  Synthetic Glucagon Analogue
  MISC_FEATURE (12)..(16): Lactam ring between side chains at position 12 and 16
HSQGTFTSDYSKYLDERRAQDFVQWLMNT

SEQ ID NO: 13 - protein, 29 aa, Artificial Sequence
  Synthetic Glucagon Analogue
  MISC_FEATURE (16)..(20): Lactam ring between side chains at positions 16 and 20
HSQGTFTSDYSKYLDERRAKDFVQWLMNT

SEQ ID NO: 14 - protein, 29 aa, Artificial Sequence
  Synthetic Glucagon Analogue
  MISC_FEATURE (22)..(24): Lactam ring between side chains at positions 22 and 24
HSQGTFTSDYSKYLDSRRAKDFVEWLMNT

SEQ ID NO: 15 - protein, 29 aa, Artificial Sequence
  Synthetic Glucagon Analogue
  MISC_FEATURE (24)..(28): Lactam ring formed between side chains at positions 24 and 28
HSQGTFTSDYSKYLDSRRAQDFVEWLMKT

SEQ ID NO: 16 - protein, 29 aa, Artificial Sequence
  Synthetic Glucagon Analogue
  MISC_FEATURE (12)..(16): Lactam ring between side chains at positions 12 and 16
  MISC_FEATURE (20)..(24): Lactam ring between side chains at positions 20 and 24
HSQGTFTSDYSKYLDERRAKDFVEWLMNT

SEQ ID NO: 17 - protein, 29 aa, Artificial Sequence
  Synthetic Glucagon Analogue
  MISC_FEATURE (16)..(20): Lactam ring between side chains at positions 16 and 20
  MISC_FEATURE (24)..(28): Lactam ring between side chains at positions 24 and 28
HSQGTFTSDYSKYLDERRADDFVEWLMKT

SEQ ID NO: 18 - protein, 29 aa, Artificial Sequence
  Synthetic Glucagon Analogue
  MISC_FEATURE (16)..(20): Lactam ring between side chains at positions 16 and 20
HSQGTFTSDYSKYLDERRAKDFVEWLMKT

SEQ ID NO: 19 - protein, 30 aa, Artificial Sequence
  Synthetic Glucagon Analogue
  MISC_FEATURE: c-term amidation
  MOD_RES (30)..(30): Variable amino acid
HSQGTFTSDYSKYLDERRAQDFVQWLMNTX

SEQ ID NO: 20 - protein, 29 aa, Artificial Sequence
  Synthetic Glucagon Analogue
  MOD_RES (16)..(16): Ser, Glu, Gln, homoglutamic acid or homocysteic acid
  MOD_RES (20)..(20): Gln, Lys, Arg, Orn or Citrulline
  MOD_RES (24)..(24): Gln or Glu
  MOD_RES (28)..(28): Asn, Asp or Lys
  MOD_RES (29)..(29): Thr or Gly
HSQGTFTSDYSKYLDXRRAXDFVXWLMXX

SEQ ID NO: 21 - protein, 29 aa, Artificial Sequence
  Synthetic Glucagon Analogue
  MISC_FEATURE: c-term amidation
  MOD_RES (2)..(2): Xaa is D-Ser, Ala, Gly, N-methyl Ser or AIB
HXQGTFTSDYSKYLDERRAQDFVQWLMNT

SEQ ID NO: 22 - protein, 29 aa, Artificial Sequence
  Synthetic Glucagon Analogue
  MISC_FEATURE: c-term amidation
  MOD_RES (2)..(2): Xaa is AIB
HXQGTFTSDYSKYLDERRAQDFVQWLMNT

SEQ ID NO: 23 - protein, 29 aa, Artificial Sequence
  Synthetic Glucagon Analogue
  MISC_FEATURE: c-term amidation
  MOD_RES (17)..(17): Cys-PEG
  MOD_RES (27)..(27): Met, Leu or Nle
HSQGTFTSDYSKYLDECRAQDFVQWLXNT

SEQ ID NO: 24 - protein, 29 aa, Artificial Sequence
  Synthetic Glucagon Analogue
  MISC_FEATURE: c-term amidation
  MOD_RES (21)..(21): Cys-PEG
  MOD_RES (27)..(27): Met, Leu or Nle
HSQGTFTSDYSKYLDERRAQCFVQWLXNT

SEQ ID NO: 25 - protein, 29 aa, Artificial Sequence
  Synthetic Glucagon Analogue
  MISC_FEATURE: c-term amidation
  MOD_RES (24)..(24): Cys-PEG
  MOD_RES (27)..(27): Met, Leu or Nle
HSQGTFTSDYSKYLDERRAQDFVCWLXNT

SEQ ID NO: 26 - protein, 10 aa, Artificial Sequence
  Synthetic peptide fragment representing the carboxy terminal 10 amino acids Exendin-4
GPSSGAPPPS

SEQ ID NO: 27 - protein, 8 aa, Artificial Sequence
  Synthetic peptide fragment representing the carboxy terminal 8 amino acids of oxyntomodulin
KRNRNNIA

SEQ ID NO: 28 - protein, 4 aa, Artificial Sequence
  Synthetic peptide
KRNR

SEQ ID NO: 29 - protein, 10 aa, Artificial Sequence
  Synthetic peptide fragment representing the carboxy terminal 10 amino acids of Exendin-4
  MISC_FEATURE: c-term amidation
GPSSGAPPPS

SEQ ID NO: 30 - protein, 39 aa, Artificial Sequence
  Synthetic Glucagon Analogue
  MOD_RES (27)..(27): Met, Leu or Nle
HSQGTFTSDYSKYLDERRAQDFVQWLXNTGPSSGAPPPS

SEQ ID NO: 31 - protein, 37 aa, Artificial Sequence
  Synthetic Glucagon Analogue
  MOD_RES (27)..(27): Met, Leu or Nle
HSQGTFTSDYSKYLDERRAQDFVQWLXNTKRNRNNIA

SEQ ID NO: 32 - protein, 33 aa, Artificial Sequence
  Synthetic Glucagon Analogue
  MOD_RES (27)..(27): Met, Leu or Nle
HSQGTFTSDYSKYLDERRAQDFVQWLXNTKRNR

SEQ ID NO: 33 - protein, 29 aa, Artificial Sequence
  Synthetic Glucagon Analogue
  MOD_RES (15)..(15): Asp, Glu, homoglutamic acid, cysteic acid or homocysteic acid
  MOD_RES (16)..(16): Ser, Glu, Gln, homoglutamic acid or homocysteic acid
  MOD_RES (20)..(20): Gln or Lys
  MOD_RES (24)..(24): Gln or Glu
  MOD_RES (28)..(28): Asn, Lys or an acidic amino acid
  MOD_RES (29)..(29): Thr, Gly or an acidic amino acid
HSQGTFTSDYSKYLXXRRAXDFVXWLMXX

SEQ ID NO: 34 - protein, 29 aa, Artificial Sequence
  Synthetic Glucagon Analogue
  MOD_RES (15)..(15): Asp, Glu, cysteic acid, homoglutamic acid or homocysteic acid
  MOD_RES (16)..(16): Ser, Glu, Gln, homoglutamic acid or homocysteic acid
  MOD_RES (20)..(20): Gln or Lys
  MOD_RES (24)..(24): Gln or Glu
  MOD_RES (28)..(28): Asn, Asp or Lys
  MOD_RES (29)..(29): Thr or Gly
HSQGTFTSDYSKYLDXRRAXDFVXWLMXX

SEQ ID NO: 35 - protein, 29 aa, Artificial Sequence
  Synthetic Glucagon Analogue
HSQGTFTSDYSKYLDSCRAQDFVQWLMNT

SEQ ID NO: 36 - protein, 39 aa, Artificial Sequence
  Synthetic Glucagon Analogue
HSQGTFTSDYSKYLDSRRAQDFVQWLMNTGPSSGAPPPS

SEQ ID NO: 37 - protein, 29 aa, Artificial Sequence
  Synthetic Glucagon Analogue
  MOD_RES (24)..(24): 2-butyrolactone bound through thiol group of Cys
HSQGTFTSDYSKYLDSRRAQDFVCWLMNT

SEQ ID NO: 38 - protein, 29 aa, Artificial Sequence
  Synthetic Glucagon Analogue
  MOD_RES (24)..(24): Carboxymethyl group bound through thiol group of Cys
HSQGTFTSDYSKYLDSRRAQDFVCWLMNT

SEQ ID NO: 39 - protein, 39 aa, Artificial Sequence
  Synthetic Glucagon Analogue
HSQGTFTSDYSRYLDSRRAQDFVQWLMNTGPSSGAPPPS

SEQ ID NO: 40 - protein, 29 aa, Artificial Sequence
  Synthetic Glucagon Analogue
  MISC_FEATURE: c-term amidation
  MOD_RES (15)..(15): Glu or Asp
  MOD_RES (28)..(28): Glu or Asp
HSQGTFTSDYSKYLXERRAQDFVQWLMXT

SEQ ID NO: 41 - protein, 29 aa, Artificial Sequence
  Synthetic Glucagon Analogue
  MISC_FEATURE: c-term amidation; lactam ring between side chains at positions 12 and 16
  MISC_FEATURE: c-term amidation
  MISC_FEATURE (12)..(16): Lactam ring between side chains at positions 12 and 16
  MOD_RES (15)..(15): Glu or Asp
  MOD_RES (28)..(28): Glu or Asp
HSQGTFTSDYSKYLXERRAQDFVQWLMXT

SEQ ID NO: 42 - protein, 29 aa, Artificial Sequence
  Synthetic Glucagon Analogue
  MISC_FEATURE: c-term amidation; lactam ring between side chains at positions 16 and 20
  MISC_FEATURE: c-term amidation
  MOD_RES (15)..(15): Glu or Asp
  MISC_FEATURE (16)..(20): Lactam ring between side chains at positions 16 and 20
  MOD_RES (28)..(28): Glu or Asp
HSQGTFTSDYSKYLXERRAKDFVQWLMXT

SEQ ID NO: 43 - protein, 29 aa, Artificial Sequence
  Synthetic Glucagon Analogue
  MISC_FEATURE: c-term amidation
  MOD_RES (15)..(15): Glu or Asp
  MISC_FEATURE (20)..(24): Lactam ring between side chains at positions 20 and 24
  MOD_RES (28)..(28): Glu or Asp
HSQGTFTSDYSKYLXSRRAKDFVEWLMXT

SEQ ID NO: 44 - protein, 29 aa, Artificial Sequence
  Synthetic Glucagon Analogue
  MISC_FEATURE: c-term amidation
  MOD_RES (15)..(15): Glu or Asp
  MISC_FEATURE (24)..(28): Lactam ring between side chains at positions 24 and 28
  MOD_RES (29)..(29): Glu or Thr
HSQGTFTSDYSKYLXSRRAQDFVEWLMKX

SEQ ID NO: 45 - protein, 29 aa, Artificial Sequence
  Synthetic Glucagon Analogue
  MOD_RES (12)..(12): Lys or Glu
  MOD_RES (15)..(15): Asp, Glu, homoglutamic acid, cysteic acid or homocysteic acid
  MOD_RES (16)..(16): Ser, Gln, Glu, Lys, homoglutamic acid, cysteic acid or homocysteic acid
  MOD_RES (20)..(20): Gln, Glu or Lys
  MOD_RES (24)..(24): Gln, Lys or Glu
  MOD_RES (28)..(28): Asn, Lys or an acidic amino acid
  MOD_RES (29)..(29): Thr, Gly or an acidic amino acid
HSQGTFTSDYSXYLXXRRAXDFVXWLMXX

SEQ ID NO: 46 - protein, 29 aa, Artificial Sequence
  Synthetic Glucagon Analogue
  MOD_RES (16)..(16): Ser, Glu, Gln, homoglutamic acid or homocysteic acid
  MOD_RES (20)..(20): Gln or Lys
  MOD_RES (24)..(24): Gln or Glu
HSQGTFTSDYSKYLDXRRAXDFVXWLMNT

SEQ ID NO: 47 - protein, 29 aa, Artificial Sequence
  Synthetic Glucagon Analogue
HSQGTFTSDYSKYLDERRAKDFVQWLMNT

SEQ ID NO: 48 - protein, 29 aa, Artificial Sequence
  Synthetic Glucagon Analogue
HSQGTFTSDYSKYLDSRRAKDFVEWLMNT

SEQ ID NO: 49 - protein, 29 aa, Artificial Sequence
  Synthetic Glucagon Analogue
HSQGTFTSDYSKYLDSRRAQDFVEWLMKT

SEQ ID NO: 50 - protein, 31 aa, Homo sapiens
HAEGTFTSDVSSYLEGQAAKEFIAWLVKGRG

SEQ ID NO: 51 - protein, 29 aa, Artificial Sequence
  Synthetic Glucagon Analogue
  MOD_RES (15)..(15): Asp, Glu, homoglutamic acid, cysteic acid or homocysteic acid
  MOD_RES (16)..(16): Ser, Glu, Gln, homoglutamic acid or homocysteic acid
  MOD_RES (20)..(20): Gln, Lys, Arg, Orn, or Citrulline
  MOD_RES (21)..(21): Asp, Glu, homoglutamic acid, or homocysteic acid
  MOD_RES (24)..(24): Gln or Glu
  MOD_RES (28)..(28): Asn, Lys or an acidic amino acid
  MOD_RES (29)..(29): Thr, Gly or an acidic amino acid
HSQGTFTSDYSKYLXXRRAXXFVXWLMXX

SEQ ID NO: 52 - protein, 30 aa, Artificial Sequence
  Synthetic peptide
  MISC_FEATURE: c-term amidation
HAEGTFTSDVSSYLEGQAAKEFIAWLVKGR

SEQ ID NO: 53 - protein, 29 aa, Artificial Sequence
  Synthetic Glucagon Analogue
  MOD_RES (3)..(3): Glu, Orn or Nle
  MOD_RES (15)..(15): Asp, Glu, homoglutamic acid, cysteic acid or homocysteic acid
  MOD_RES (16)..(16): Ser, Glu, Gln, homoglutamic acid or homocysteic acid
  MOD_RES (20)..(20): Gln or Lys
  MOD_RES (24)..(24): Gln or Glu
  MOD_RES (28)..(28): Asn, Lys or an acidic amino acid
  MOD_RES (29)..(29): Thr or an acidic amino acid
HSXGTFTSDYSKYLXXRRAXDFVXWLMXX

SEQ ID NO: 54 - protein, 29 aa, Artificial Sequence
  Synthetic Glucagon Analogue
  MOD_RES (17)..(17): Arg or Gln
  MOD_RES (18)..(18): Arg or Ala
  MOD_RES (21)..(21): Asp or Glu
  MOD_RES (23)..(23): Val or Ile
  MOD_RES (24)..(24): Gln or Ala
HSQGTFTSDYSKYLDEXXAKXFXXWLMNT

SEQ ID NO: 55 - protein, 29 aa, Artificial Sequence
  Synthetic Glucagon Analogue
  MOD_RES (1)..(1): His, D-His, (Des-amino)His, hydroxyl-His, acetyl-His, homo-His or alpha, alpha-dimethyl imidiazole acetic acid (DMIA), N-methyl His, alpha-methyl His, or imidazole acetic acid
  MOD_RES (2)..(2): Ser, D-Ser, Ala, D-Ala, Val, Gly, N-methyl Ser, AIB or N-methyl Ala
  MOD_RES (3)..(3): Gln, Glu, Orn or  Nle
  MOD_RES (10)..(10): Tyr or Trp
  MOD_RES (12)..(12): Lys, Citrulline, Orn or Arg
  MOD_RES (15)..(15): Asp, Glu, cysteic acid, homoglutamic acid and homocysteic acid
  MOD_RES (16)..(16): Ser, Glu, Gln, homoglutamic acid or homocysteic acid
  MOD_RES (17)..(17): Arg, Gln, Lys, Cys, Orn, homocysteine or acetyl phenylalanine
  MOD_RES (18)..(18): Arg, Ala, Lys, Cys, Orn, homocysteine or acetyl phenyalanine
  MOD_RES (20)..(20): Gln, Lys, Arg, Orn or Citrulline
  MOD_RES (21)..(21): Gln, Glu, Asp, Lys, Cys, Orn, homocystein or acetyl phenyalanine
  MOD_RES (23)..(23): Val or Ile
  MOD_RES (24)..(24): Ala, Gln, Glu, Lys, Cys, Orn, homocysteine or acetyl phenyalanine
  MOD_RES (27)..(27): Met, Leu or Nle
  MOD_RES (28)..(28): Asn, Arg, Citrulline, Orn, Lys or Asp
  MOD_RES (29)..(29): Thr, Gly, Lys, Cys, Orn, homocycsteine or acetyl phenyalanine
XXXGTFTSDXSXYLXXXXAXXFXXWLXXX

SEQ ID NO: 56 - protein, 29 aa, Artificial Sequence
  Synthetic Glucagon Analogue
  MOD_RES (1)..(1): His, D-His, (Des-amino)His, hydroxyl-His, acetyl-His, homo-His, DMIA, N-methyl His, alpha-methyl His, or imidazole acetic acid
  MOD_RES (2)..(2): Ser, D-Ser, Ala, D-Ala, Val, Gly, N-methyl Ser, AIB or N-methyl Ala
  MOD_RES (3)..(3): Gln, Glu, Orn or  Nle
  MOD_RES (15)..(15): Asp, Glu, cysteic acid, homoglutamic acid and homocysteic acid
  MOD_RES (16)..(16): Ser, Glu, Gln, homoglutamic acid or homocysteic acid
  MOD_RES (20)..(20): Gln, Lys, Arg, Orn or Citrulline
  MOD_RES (21)..(21): Gln, Glu, Asp, Cys, Orn, homocycstein or acetyl phenyalanine
  MOD_RES (23)..(23): Val or Ile
  MOD_RES (24)..(24): Ala, Gln, Glu, Cys, Orn, homocycsteine or acetyl phenyalanine
  MOD_RES (27)..(27): Met, Leu or Nle
  MOD_RES (28)..(28): Asn, Lys or Asp
  MOD_RES (29)..(29): Thr, Gly, Lys, Cys, Orn, homocycsteine or acetyl phenyalanine
XXXGTFTSDYSKYLXXRRAXXFXXWLXXX

SEQ ID NO: 57 - protein, 29 aa, Artificial Sequence
  Synthetic Glucagon Analogue
  MOD_RES (1)..(1): His, D-His, (Des-amino)His, hydroxyl-His, acetyl- His, homo-His, DMIA, N-methyl His, alpha-methyl His, or imidazole acetic acid
  MOD_RES (2)..(2): Ser, D-Ser, Ala, D-Ala, Val, Gly, N-methyl Ser, AIB or N-methyl Ala
  MOD_RES (3)..(3): Gln, Glu, Orn or  Nle
  MISC_FEATURE (12)..(16): Lactam ring between side changes at position 12 and 16
  MOD_RES (15)..(15): Asp, Glu, cysteic acid, homoglutamic acid and homocysteic acid
  MOD_RES (20)..(20): Gln, Lys, Arg, Orn or Citrulline
  MOD_RES (21)..(21): Gln, Glu, Asp, Cys, Orn, homocycsteine or acetyl phenyalanine
  MOD_RES (23)..(23): Val or Ile
  MOD_RES (24)..(24): Ala, Gln, Glu, Lys, Cys, Orn, homocysteine or acetyl Phe
  MOD_RES (27)..(27): Met, Leu or Nle
  MOD_RES (28)..(28): Asn, Lys or Asp
  MOD_RES (29)..(29): Thr, Gly, Lys, Cys, Orn, homocysteine or acetyl phenyalanine
XXXGTFTSDYSKYLXERRAXXFXXWLXXX

SEQ ID NO: 58 - protein, 29 aa, Artificial Sequence
  Synthetic Glucagon Analogue
  MOD_RES (1)..(1): His, D-His, (Des-amino)His, hydroxyl-His, acetyl-His, homo-His, DMIA, N-methyl His, alpha-methyl His, or imidazole acetic acid
  MOD_RES (2)..(2): Ser, D-Ser, Ala, D-Ala, Val, Gly, N-methyl Ser, AIB or N-methyl Ala
  MOD_RES (3)..(3): Gln, Glu, Orn or Nle
  MOD_RES (15)..(15): Asp, Glu, cysteic acid, homoglutamic acid or homocysteic acid
  MISC_FEATURE (16)..(20): Lactam ring between side chains at positions 16 and 20
  MOD_RES (21)..(21): Gln, Glu, Asp, Lys, Cys, Orn, homocysteine or acetyl phenyalanine
  MOD_RES (23)..(23): Val or Ile
  MOD_RES (24)..(24): Ala, Gln, Glu, Lys, Cys, Orn, homocysteine or acetyl phenyalanine
  MOD_RES (27)..(27): Met, Leu or Nle
  MOD_RES (28)..(28): Asn, Lys or Asp
  MOD_RES (29)..(29): Thr, Gly, Lys, Cys, Orn, homocysteine or acetyl phenyalanine
XXXGTFTSDYSKYLXERRAKXFXXWLXXX

SEQ ID NO: 59 - protein, 29 aa, Artificial Sequence
  Synthetic Glucagon Analogue
  MOD_RES (1)..(1): His, D-His, (Des-amino)His, hydroxyl-His, acetyl-His, homo-His, DMIA, N-methyl His, alpha-methyl His, or imidazole acetic acid
  MOD_RES (2)..(2): Ser, D-Ser, Ala, D-Ala, Val, Gly, N-methyl Ser, AIB, or N-methyl Ala
  MOD_RES (3)..(3): Gln, Glu, Orn or  Nle
  MOD_RES (15)..(15): Asp, Glu, cysteic acid, homoglutamic acid and homocysteic acid
  MOD_RES (16)..(16): Ser, Glu, Gln, homoglutamic acid or homocysteic acid
  MISC_FEATURE (20)..(24): Lactam ring between side chains at position 20 and 24
  MOD_RES (21)..(21): Gln, Glu, Asp, Lys, Cys, Orn, homocysteine or acetyl phenyalanine
  MOD_RES (23)..(23): Val or Ile
  MOD_RES (27)..(27): Met, Leu or Nle
  MOD_RES (28)..(28): Asn, Lys or Asp
  MOD_RES (29)..(29): Thr, Gly, Lys, Cys, Orn, homocysteine or acetyl pheylalanine
XXXGTFTSDYSKYLXXRRAKXFXEWLXXX

SEQ ID NO: 60 - protein, 29 aa, Artificial Sequence
  Synthetic Glucagon Analogue
  MOD_RES (1)..(1): His, D-His, (Des-amino)His, hydroxyl-His, acetyl-His, homo-His, DMIA, N-methyl His, alpha-methyl His, or imidazole acetic acid
  MOD_RES (2)..(2): Ser, D-Ser, Ala, D-Ala, Val, Gly, N-methyl Ser, AIB or N-methyl Ala
  MOD_RES (3)..(3): Gln, Glu, Orn or  Nle
  MOD_RES (15)..(15): Asp, Glu, cysteic acid, homoglutamic acid and homocysteic acid
  MOD_RES (16)..(16): Ser, Glu, Gln, homoglutamic acid or homocysteic acid
  MOD_RES (20)..(20): Gln, Lys, Arg, Orn, or Citrulline
  MOD_RES (21)..(21): Gln, Glu, Asp, Lys, Cys, Orn, homocysteine or acetyl phenyalanine
  MOD_RES (23)..(23): Val or Ile
  MISC_FEATURE (24)..(28): Lactam ring between side chains at position 24 and 28
  MOD_RES (27)..(27): Met, Leu or Nle
  MOD_RES (29)..(29): Thr, Gly, Lys, Cys, Orn, homocysteine or acetyl phenyalanine
XXXGTFTSDYSKYLXXRRAXXFXEWLXKX

SEQ ID NO: 61 - protein, 40 aa, Artificial Sequence
  Synthetic Glucagon Analogue
  MISC_FEATURE: positions 30 to 40 are present only if position 29 is Gly; see specification as filed for detailed description of substitutions and preferred embodiments
  MOD_RES (1)..(1): His, D-His, (Des-amino)His, hydroxyl-His, acetyl-His, homo-His, DMIA, N-methyl His, alpha-methyl His, or imidazole acetic acid
  MOD_RES (2)..(2): Ser, D-Ser, Ala, Val, Gly, N-methyl Ser, Aib, N-methyl, Ala or D-Ala
  MOD_RES (18)..(18): Ala or Arg
  MOD_RES (24)..(24): Ala, Gln or Cys-PEG
  MOD_RES (29)..(29): Thr-CONH2, Cys-PEG, or Gly
  MOD_RES (40)..(40): Cys-PEG or not present
XXQGTFTSDYSKYLDERXAKDFVXWLMNXGPSSGAPPPSC

SEQ ID NO: 62 - protein, 40 aa, Artificial Sequence
  Synthetic Glucagon Analogue
  MISC_FEATURE: positions 30 to 40 are present only if position 29 is Gly; see specification as filed for detailed description of substitutions and preferred embodiments
  MOD_RES (1)..(1): His, D-His, (Des-amino)His, hydroxyl-His, acetyl-His, homo-His, DMIA, N-methyl His, alpha-methyl His, or imidazole acetic acid
  MOD_RES (2)..(2): Ser, D-Ser, Ala, Val, Gly, N-methyl Ser, AIB0, N-methyl Ala, or D-Ala
  MOD_RES (18)..(18): Ala or Arg
  MOD_RES (24)..(24): Ala, Gln or Cys-PEG
  MOD_RES (29)..(29): Thr-CONH2, Cys-PEG, or Gly
  MOD_RES (40)..(40): Cys-PEG or not present
XXQGTFTSDYSKYLDEQXAKEFIXWLMNXGPSSGAPPPSC

SEQ ID NO: 63 - protein, 29 aa, Artificial Sequence
  Synthetic Glucagon Analogue
  MOD_RES (16)..(16): Ser, Glu, Gln, homoglutamic acid or homocysteic acid
  MOD_RES (20)..(20): Gln or Lys
  MOD_RES (21)..(21): Asp, Lys, Cys, Orn, homocysteine or acetyl phealanine
  MOD_RES (24)..(24): Gln, Lys, Cys, Orn, homocysteine or acetyl phealanine
  MOD_RES (27)..(27): Met, Leu or Nle
HSQGTFTSDYSKYLDXRRAXXFVXWLXNT

SEQ ID NO: 64 - protein, 38 aa, Artificial Sequence
  Synthetic Glucagon Analogue
  MOD_RES (15)..(15): Asp, Glu, homoglutamic acid, cysteic acid or homocysteic acid
  MOD_RES (16)..(16): Ser, Glu, Gln, homoglutamic acid or homocysteic acid
  MOD_RES (20)..(20): Gln or Lys
  MOD_RES (24)..(24): Gln or Glu
  MOD_RES (28)..(28): Asn, Lys or Asp
HSQGTFTSDYSKYLXXRRAXDFVXWLMXGGPSSGPPPS

SEQ ID NO: 65 - protein, 11 aa, Artificial Sequence
  Synthetic peptide fragment representing the carboxy terminal 10 amino acids of Exdendin-4
  MOD_RES (11)..(11): Cys-PEG
GPSSGAPPPSC

SEQ ID NO: 66 - protein, 29 aa, Artificial Sequence
  Synthetic Glucagon Analogue
  MISC_FEATURE (12)..(16): Lactam ring between side chains at positions 12 and 16
  MOD_RES (28)..(28): Asp or Asn
  MOD_RES (29)..(29): Thr or Gly
HSQGTFTSDYSKYLDERRAQDFVQWLMXX

SEQ ID NO: 67 - protein, 29 aa, Artificial Sequence
  Synthetic Glucagon Analogue
  MISC_FEATURE (16)..(20): Lactam ring between side chains at positions 16 and 20
  MOD_RES (28)..(28): Asp or Asn
  MOD_RES (29)..(29): Thr or Gly
HSQGTFTSDYSKYLDERRAKDFVQWLMXX

SEQ ID NO: 68 - protein, 29 aa, Artificial Sequence
  Synthetic Glucagon Analogue
  MISC_FEATURE (20)..(24): Lactam ring between side chains at positions 20 and 24
  MOD_RES (28)..(28): Asp or Asn
  MOD_RES (29)..(29): Thr or Gly
HSQGTFTSDYSKYLDSRRAKDFVEWLMXX

SEQ ID NO: 69 - protein, 29 aa, Artificial Sequence
  glucagon analogue
  MISC_FEATURE (24)..(28): Lactam ring between side chains at positions 24 and 28
  MOD_RES (29)..(29): Thr or Gly
HSQGTFTSDYSKYLDSRRAQDFVEWLMKX

SEQ ID NO: 70 - protein, 29 aa, Artificial Sequence
  Synthetic peptide
  MISC_FEATURE: c-term amidation
HSQGTFTSDYSKYLDERRAQDFVQWLMNT

SEQ ID NO: 71 - protein, 29 aa, Artificial Sequence
  Synthetic peptide
  MISC_FEATURE: c-term amidation
HSQGTFTSDYSKYLDERRAKDFVQWLMNT

SEQ ID NO: 72 - protein, 29 aa, Artificial Sequence
  Synthetic peptide
  MISC_FEATURE: c-term amidation
  MISC_FEATURE (16)..(20): Lactam ring between side chains at positions 16 and 20
HSQGTFTSDYSKYLDERRAKDFVQWLMNT

SEQ ID NO: 73 - protein, 29 aa, Artificial Sequence
  Synthetic peptide
  MISC_FEATURE: c-term amidation
  MISC_FEATURE (12)..(16): Lactam ring between side chains at positions 12 and 16
HSQGTFTSDYSKYLDERRAQDFVQWLMNT

SEQ ID NO: 74 - protein, 29 aa, Artificial Sequence
  Synthetic peptide
  MISC_FEATURE: c-term amidation
  MISC_FEATURE (12)..(16): Lactam ring between side chains at positions 12 and 16
HSQGTFTSDYSKYLDERRAKDFVQWLMNT

SEQ ID NO: 75 - protein, 29 aa, Artificial Sequence
  Synthetic peptide
  MISC_FEATURE: c-term amidation
  MISC_FEATURE (16)..(20): Lactam ring between side chains at positions 16 and 20
HSQGTFTSDYSKYLDKRRAEDFVQWLMNT

SEQ ID NO: 76 - protein, 29 aa, Artificial Sequence
  Synthetic peptide
  MISC_FEATURE: c-term amidation
HSQGTFTSDYSKYLDERAAKDFVQWLMNT

SEQ ID NO: 77 - protein, 29 aa, Artificial Sequence
  Synthetic Polypeptide
  MISC_FEATURE: c-term amidation
  MISC_FEATURE (16)..(20): Lactam ring between side chains at positions 16 and 20
HSQGTFTSDYSKYLDERAAKDFVQWLMNT

SEQ ID NO: 78 - protein, 29 aa, Artificial Sequence
  Synthetic Polypeptide
  MISC_FEATURE: c-term amidation
  MISC_FEATURE (12)..(16): Lactam ring between side chains at positions 12 and 16
HSQGTFTSDYSKYLDERAAQDFVQWLMNT

SEQ ID NO: 79 - protein, 29 aa, Artificial Sequence
  Synthetic Polypeptide
  MISC_FEATURE: c-term amidation
  MISC_FEATURE (12)..(16): Lactam ring between side chains at positions 12 and 16
HSQGTFTSDYSKYLDERAAKDFVQWLMNT

SEQ ID NO: 80 - protein, 29 aa, Artificial Sequence
  Synthetic Polypeptide
  MISC_FEATURE: c-term amidation
  MISC_FEATURE (16)..(20): Lactam ring between side chains at positions 16 and 20
HSQGTFTSDYSKYLDKRAAEDFVQWLMNT

SEQ ID NO: 81 - protein, 29 aa, Artificial Sequence
  Synthetic Polypeptide
  MISC_FEATURE: c-term amidation
HSQGTFTSDYSKYLDEQAAKEFIAWLMNT

SEQ ID NO: 82 - protein, 29 aa, Artificial Sequence
  Synthetic Polypeptide
  MISC_FEATURE: c-term amidation
  MISC_FEATURE (12)..(16): Lactam ring between side chains at positions 12 and 16
HSQGTFTSDYSKYLDEQAAKEFIAWLMNT

SEQ ID NO: 83 - protein, 29 aa, Artificial Sequence
  Synthetic Polypeptide
  MISC_FEATURE: c-term amidation
  MISC_FEATURE (16)..(20): Lactam ring between side chains at positions 16 and 20
HSQGTFTSDYSKYLDEQAAKEFIAWLMNT

SEQ ID NO: 84 - protein, 29 aa, Artificial Sequence
  Synthetic Polypeptide
  MISC_FEATURE: c-term amidation
HSQGTFTSDYSKYLDEQAAKEFIAWLVKG

SEQ ID NO: 85 - protein, 29 aa, Artificial Sequence
  Synthetic Polypeptide
  MISC_FEATURE: c-term amidation
  MISC_FEATURE (12)..(16): Lactam ring between side chains at positions 12 and 16
HSQGTFTSDYSKYLDEQAAKEFIAWLVKG

SEQ ID NO: 86 - protein, 29 aa, Artificial Sequence
  Synthetic Polypeptide
  MISC_FEATURE: c-term amidation
  MISC_FEATURE (16)..(20): Lactam ring between side chains at positions 16 and 20
HSQGTFTSDYSKYLDEQAAKEFIAWLVKG

SEQ ID NO: 87 - protein, 29 aa, Artificial Sequence
  Synthetic Polypeptide
  MISC_FEATURE: c-term amidation
  MOD_RES (1)..(1): (Des-amino)His
XSQGTFTSDYSKYLDERRAQDFVQWLMNT

SEQ ID NO: 88 - protein, 29 aa, Artificial Sequence
  Synthetic Polypeptide
  MISC_FEATURE: c-term amidation
  MOD_RES (1)..(1): (Des-amino)His
XSQGTFTSDYSKYLDERRAKDFVQWLMNT

SEQ ID NO: 89 - protein, 29 aa, Artificial Sequence
  Synthetic Polypeptide
  MISC_FEATURE: c-term amidation
  MOD_RES (1)..(1): (Des-amino)His
  MISC_FEATURE (16)..(20): Lactam ring between side chains at positions 16 and 20
XSQGTFTSDYSKYLDERRAKDFVQWLMNT

SEQ ID NO: 90 - protein, 29 aa, Artificial Sequence
  Synthetic Polypeptide
  MISC_FEATURE: c-term amidation
  MOD_RES (1)..(1): (Des-amino)His
  MISC_FEATURE (12)..(16): Lactam ring between side chains at positions 12 and 16
XSQGTFTSDYSKYLDERRAQDFVQWLMNT

SEQ ID NO: 91 - protein, 29 aa, Artificial Sequence
  Synthetic Polypeptide
  MISC_FEATURE: c-term amidation
  MOD_RES (1)..(1): (Des-amino)His
  MISC_FEATURE (12)..(16): Lactam ring between side chains at positions 12 and 16
XSQGTFTSDYSKYLDERRAKDFVQWLMNT

SEQ ID NO: 92 - protein, 29 aa, Artificial Sequence
  Synthetic Polypeptide
  MISC_FEATURE: c-term amidation
  MOD_RES (1)..(1): (Des-amino)His
  MISC_FEATURE (16)..(20): Lactam ring between side chains at positions 16 and 20
XSQGTFTSDYSKYLDKRRAEDFVQWLMNT

SEQ ID NO: 93 - protein, 29 aa, Artificial Sequence
  Synthetic Polypeptide
  MOD_RES (1)..(1): (Des-amino)His
  MISC_FEATURE (29)..(29): c-term amidation
XSQGTFTSDYSKYLDERAAKDFVQWLMNT

SEQ ID NO: 94 - protein, 29 aa, Artificial Sequence
  Synthetic Polypeptide
  MISC_FEATURE: c-term amidation
  MOD_RES (1)..(1): (Des-amino)His
  MISC_FEATURE (16)..(20): Lactam ring between side chains at positions 16 and 20
XSQGTFTSDYSKYLDERAAKDFVQWLMNT

SEQ ID NO: 95 - protein, 29 aa, Artificial Sequence
  Synthetic Polypeptide
  MISC_FEATURE: c-term amidation
  MOD_RES (1)..(1): (Des-amino)His
  MISC_FEATURE (12)..(16): Lactam ring between side chains at positions 12 and 16
XSQGTFTSDYSKYLDERAAQDFVQWLMNT

SEQ ID NO: 96 - protein, 29 aa, Artificial Sequence
  Synthetic Polypeptide
  MISC_FEATURE: c-term amidation
  MOD_RES (1)..(1): (Des-amino)His
  MISC_FEATURE (12)..(16): Lactam ring between side chains at positions 12 and 16
XSQGTFTSDYSKYLDERAAKDFVQWLMNT

SEQ ID NO: 97 - protein, 29 aa, Artificial Sequence
  Synthetic Polypeptide
  MISC_FEATURE: c-term amidation
  MOD_RES (1)..(1): (Des-amino)His
  MISC_FEATURE (16)..(20): Lactam ring between side chains at positions 16 and 20
XSQGTFTSDYSKYLDKRAAEDFVQWLMNT

SEQ ID NO: 98 - protein, 29 aa, Artificial Sequence
  Synthetic Polypeptide
  MISC_FEATURE: c-term amidation
  MOD_RES (1)..(1): (Des-amino)His
  MISC_FEATURE (12)..(16): Lactam ring between side chains at positions 12 and 16
XSQGTFTSDYSKYLDEQAAKEFIAWLMNT

SEQ ID NO: 99 - protein, 29 aa, Artificial Sequence
  Synthetic Polypeptide
  MISC_FEATURE: c-term amidation
  MOD_RES (1)..(1): (Des-amino)His
  MISC_FEATURE (12)..(16): Lactam ring between side chains at positions 12 and 16
XSQGTFTSDYSKYLDEQAAKEFIAWLMNT

SEQ ID NO: 100 - protein, 29 aa, Artificial Sequence
  Synthetic Polypeptide
  MISC_FEATURE: c-term amidation
  MOD_RES (1)..(1): (Des-amino)His
  MISC_FEATURE (16)..(20): Lactam ring between side chains at positions 16 and 20
XSQGTFTSDYSKYLDEQAAKEFIAWLMNT

SEQ ID NO: 101 - protein, 29 aa, Artificial Sequence
  Synthetic Polypeptide
  MISC_FEATURE: c-term amidation
  MOD_RES (1)..(1): (Des-amino)His
XSQGTFTSDYSKYLDEQAAKEFIAWLVKG

SEQ ID NO: 102 - protein, 29 aa, Artificial Sequence
  Synthetic Polypeptide
  MISC_FEATURE: C-terminal amidation
  MOD_RES (1)..(1): (Des-amino)His
  MISC_FEATURE (12)..(16): Lactam ring between side chains at positions 12 and 16
XSQGTFTSDYSKYLDEQAAKEFIAWLVKG

SEQ ID NO: 103 - protein, 29 aa, Artificial Sequence
  Synthetic Polypeptide
  MISC_FEATURE: C-terminal amidation
  MOD_RES (1)..(1): (Des-amino)His
  MISC_FEATURE (16)..(20): Lactam ring between side chains at positions 16 and 20
XSQGTFTSDYSKYLDEQAAKEFIAWLVKG

SEQ ID NO: 104 - protein, 29 aa, Artificial Sequence
  Synthetic Polypeptide
  MOD_RES (2)..(2): Xaa is AIB
  MOD_RES (29)..(29): C-terminal amidation
HXQGTFTSDYSKYLDERRAQDFVQWLMNT

SEQ ID NO: 105 - protein, 29 aa, Artificial Sequence
  Synthetic Polypeptide
  MOD_RES (2)..(2): Xaa is AIB
  MISC_FEATURE (16)..(20): Lactam ring between side chains at positions 16 and 20
  MOD_RES (29)..(29): C-terminal amidation
HXQGTFTSDYSKYLDERRAKDFVQWLMNT

SEQ ID NO: 106 - protein, 29 aa, Artificial Sequence
  Synthetic Polypeptide
  MOD_RES (2)..(2): Xaa is AIB
  MISC_FEATURE (16)..(20): Lactam ring between side chains at positions 16 and 20
  MOD_RES (29)..(29): C-terminal amidation
HXQGTFTSDYSKYLDERRAKDFVQWLMNT

SEQ ID NO: 107 - protein, 29 aa, Artificial Sequence
  Synthetic Polypeptide
  MOD_RES (2)..(2): Xaa is AIB
  MISC_FEATURE (12)..(16): Lactam ring between side chains at positions 12 and 16
  MOD_RES (29)..(29): C-terminal amidation
HXQGTFTSDYSKYLDERRAQDFVQWLMNT

SEQ ID NO: 108 - protein, 29 aa, Artificial Sequence
  Synthetic Polypeptide
  MOD_RES (2)..(2): Xaa is AIB
  MISC_FEATURE (12)..(16): Lactam ring between side chains at positions 12 and 16
  MOD_RES (29)..(29): C-terminal amidation
HXQGTFTSDYSKYLDERRAKDFVQWLMNT

SEQ ID NO: 109 - protein, 29 aa, Artificial Sequence
  Synthetic Polypeptide
  MOD_RES (2)..(2): Xaa is AIB
  MISC_FEATURE (16)..(20): Lactam ring between side chains at positions 16 and 20
  MOD_RES (29)..(29): C-terminal amidation
HXQGTFTSDYSKYLDKRRAEDFVQWLMNT

SEQ ID NO: 110 - protein, 29 aa, Artificial Sequence
  Synthetic Polypeptide
  MOD_RES (2)..(2): Xaa is AIB
  MOD_RES (29)..(29): C-terminal amidation
HXQGTFTSDYSKYLDERAAKDFVQWLMNT

SEQ ID NO: 111 - protein, 29 aa, Artificial Sequence
  Synthetic Polypeptide
  MOD_RES (2)..(2): Xaa is AIB
  MISC_FEATURE (16)..(20): Lactam ring between side chains at positions 16 and 20
  MOD_RES (29)..(29): C-terminal amidation
HXQGTFTSDYSKYLDERAAKDFVQWLMNT

SEQ ID NO: 112 - protein, 29 aa, Artificial Sequence
  Synthetic Polypeptide
  MOD_RES (2)..(2): Xaa is AIB
  MISC_FEATURE (12)..(16): Lactam ring between side chains at positions 12 and 16
  MOD_RES (29)..(29): C-terminal amidation
HXQGTFTSDYSKYLDERAAQDFVQWLMNT

SEQ ID NO: 113 - protein, 29 aa, Artificial Sequence
  glucagon analog
  MOD_RES (2)..(2): Xaa is AIB
  MISC_FEATURE (12)..(16): Lactam ring between side chains at positions 12 and 16
  MOD_RES (29)..(29): C-terminal amidation
HXQGTFTSDYSKYLDERAAKDFVQWLMNT

SEQ ID NO: 114 - protein, 29 aa, Artificial Sequence
  glucagon analog
  MOD_RES (2)..(2): Xaa is AIB
  MISC_FEATURE (16)..(20): Lactam ring between side chains at positions 16 and 20
  MOD_RES (29)..(29): C-terminal amidation
HXQGTFTSDYSKYLDKRAAEDFVQWLMNT

SEQ ID NO: 115 - protein, 29 aa, Artificial Sequence
  glucagon analog
  MOD_RES (2)..(2): Xaa is AIB
  MOD_RES (29)..(29): C-terminal amidation
HXQGTFTSDYSKYLDEQAAKEFIAWLMNT

SEQ ID NO: 116 - protein, 29 aa, Artificial Sequence
  glucagon analog
  MOD_RES (2)..(2): Xaa is AIB
  MISC_FEATURE (12)..(16): Lactam ring between side chains at positions 12 and 16
  MOD_RES (29)..(29): C-terminal amidation
HXQGTFTSDYSKYLDEQAAKEFIAWLMNT

SEQ ID NO: 117 - protein, 29 aa, Artificial Sequence
  glucagon analog
  MOD_RES (2)..(2): Xaa is AIB
  MISC_FEATURE (16)..(20): Lactam ring between side chains at positions 16 and 20
  MOD_RES (29)..(29): C-terminal amidation
HXQGTFTSDYSKYLDEQAAKEFIAWLMNT

SEQ ID NO: 118 - protein, 29 aa, Artificial Sequence
  glucagon analog
  MOD_RES (2)..(2): Xaa is AIB
  MOD_RES (29)..(29): C-terminal amidation
HXQGTFTSDYSKYLDEQAAKEFIAWLVKG

SEQ ID NO: 119 - protein, 29 aa, Artificial Sequence
  glucagon analog
  MOD_RES (2)..(2): Xaa is AIB
  MISC_FEATURE (12)..(16): Lactam ring between side chains at positions 12 and 16
  MOD_RES (29)..(29): C-terminal amidation
HXQGTFTSDYSKYLDEQAAKEFIAWLVKG

SEQ ID NO: 120 - protein, 29 aa, Artificial Sequence
  glucagon analog
  MOD_RES (2)..(2): Xaa is AIB
  MISC_FEATURE (16)..(20): Lactam ring between side chains at positions 16 and 20
  MOD_RES (29)..(29): C-terminal amidation
HXQGTFTSDYSKYLDEQAAKEFIAWLVKG

SEQ ID NO: 121 - protein, 29 aa, Artificial Sequence
  glucagon analog
  MOD_RES (2)..(2): D-Ala
  MOD_RES (29)..(29): C-terminal amidation
HXQGTFTSDYSKYLDERRAQDFVQWLMNT

SEQ ID NO: 122 - protein, 29 aa, Artificial Sequence
  glucagon analog
  MOD_RES (2)..(2): D-Ala
  MOD_RES (29)..(29): C-terminal amidation
HXQGTFTSDYSKYLDERRAKDFVQWLMNT

SEQ ID NO: 123 - protein, 29 aa, Artificial Sequence
  glucagon analog
  MOD_RES (2)..(2): D-Ala
  MISC_FEATURE (16)..(20): Lactam ring between side chains at positions 16 and 20
  MOD_RES (29)..(29): C-terminal amidation
HXQGTFTSDYSKYLDERRAKDFVQWLMNT

SEQ ID NO: 124 - protein, 29 aa, Artificial Sequence
  glucagon analog
  MOD_RES (2)..(2): D-Ala
  MISC_FEATURE (12)..(16): Lactam ring between side chains at positions 12 and 16
  MOD_RES (29)..(29): C-terminal amidation
HXQGTFTSDYSKYLDERRAQDFVQWLMNT

SEQ ID NO: 125 - protein, 29 aa, Artificial Sequence
  glucagon analog
  MOD_RES (2)..(2): D-Ala
  MISC_FEATURE (12)..(16): Lactam ring between side chains at positions 12 and 16
  MOD_RES (29)..(29): C-terminal amidation
HXQGTFTSDYSKYLDERRAKDFVQWLMNT

SEQ ID NO: 126 - protein, 29 aa, Artificial Sequence
  glucagon analog
  MOD_RES (2)..(2): D-Ala
  MISC_FEATURE (16)..(20): Lactam ring between side chains at positions 16 and 20
  MOD_RES (29)..(29): C-terminal amidation
HXQGTFTSDYSKYLDKRRAEDFVQWLMNT

SEQ ID NO: 127 - protein, 29 aa, Artificial Sequence
  glucagon analog
  MOD_RES (2)..(2): D-Ala
  MOD_RES (29)..(29): C-terminal amidation
HXQGTFTSDYSKYLDERAAKDFVQWLMNT

SEQ ID NO: 128 - protein, 29 aa, Artificial Sequence
  glucagon analog
  MOD_RES (2)..(2): D-Ala
  MISC_FEATURE (16)..(20): Lactam ring between side chains at positions 16 and 20
  MOD_RES (29)..(29): C-terminal amidation
HXQGTFTSDYSKYLDERAAKDFVQWLMNT

SEQ ID NO: 129 - protein, 29 aa, Artificial Sequence
  glucagon analog
  MOD_RES (2)..(2): D-Ala
  MISC_FEATURE (12)..(16): Lactam ring between side chains at positions 12 and 16
  MOD_RES (29)..(29): C-terminal amidation
HXQGTFTSDYSKYLDERAAQDFVQWLMNT

SEQ ID NO: 130 - protein, 29 aa, Artificial Sequence
  glucagon analog
  MOD_RES (2)..(2): D-Ala
  MISC_FEATURE (12)..(16): Lactam ring between side chains at positions 12 and 16
  MOD_RES (29)..(29): C-terminal amidation
HXQGTFTSDYSKYLDERAAKDFVQWLMNT

SEQ ID NO: 131 - protein, 29 aa, Artificial Sequence
  glucagon analog
  MOD_RES (2)..(2): D-Ala
  MISC_FEATURE (16)..(20): Lactam ring between side chains at positions 16 and 20
  MOD_RES (29)..(29): C-terminal amidation
HXQGTFTSDYSKYLDKRAAEDFVQWLMNT

SEQ ID NO: 132 - protein, 29 aa, Artificial Sequence
  glucagon analog
  MOD_RES (2)..(2): D-Ala
  MOD_RES (29)..(29): C-terminal amidation
HXQGTFTSDYSKYLDEQAAKEFIAWLMNT

SEQ ID NO: 133 - protein, 29 aa, Artificial Sequence
  glucagon analog
  MOD_RES (2)..(2): D-Ala
  MISC_FEATURE (12)..(16): Lactam ring between side chains at positions 12 and 16
  MOD_RES (29)..(29): C-terminal amidation
HXQGTFTSDYSKYLDEQAAKEFIAWLMNT

SEQ ID NO: 134 - protein, 29 aa, Artificial Sequence
  glucagon analog
  MOD_RES (2)..(2): D-Ala
  MISC_FEATURE (16)..(20): Lactam ring between side chains at positions 16 and 20
  MOD_RES (29)..(29): C-terminal amidation
HXQGTFTSDYSKYLDEQAAKEFIAWLMNT

SEQ ID NO: 135 - protein, 29 aa, Artificial Sequence
  glucagon analog
  MOD_RES (2)..(2): D-Ala
  MOD_RES (29)..(29): C-terminal amidation
HXQGTFTSDYSKYLDEQAAKEFIAWLVKG

SEQ ID NO: 136 - protein, 29 aa, Artificial Sequence
  glucagon analog
  MOD_RES (2)..(2): D-Ala
  MISC_FEATURE (12)..(16): Lactam ring between side chains at positions 12 and 16
  MOD_RES (29)..(29): C-terminal amidation
HXQGTFTSDYSKYLDEQAAKEFIAWLVKG

SEQ ID NO: 137 - protein, 29 aa, Artificial Sequence
  glucagon analog
  MOD_RES (2)..(2): D-Ala
  MISC_FEATURE (16)..(20): Lactam ring between side chains at positions 16 and 20
  MOD_RES (29)..(29): C-terminal amidation
HXQGTFTSDYSKYLDEQAAKEFIAWLVKG

SEQ ID NO: 138 - protein, 29 aa, Artificial Sequence
  glucagon analog
  MOD_RES (29)..(29): C-terminal amidation
HSEGTFTSDYSKYLDERRAQDFVQWLMNT

SEQ ID NO: 139 - protein, 29 aa, Artificial Sequence
  glucagon analog
  MOD_RES (29)..(29): C-terminal amidation
HSEGTFTSDYSKYLDERRAKDFVQWLMNT

SEQ ID NO: 140 - protein, 29 aa, Artificial Sequence
  glucagon analog
  MISC_FEATURE (16)..(20): Lactam ring between side chains at positions 16 and 20
  MOD_RES (29)..(29): C-terminal amidation
HSEGTFTSDYSKYLDERRAKDFVQWLMNT

SEQ ID NO: 141 - protein, 29 aa, Artificial Sequence
  glucagon analog
  MISC_FEATURE (12)..(16): Lactam ring between side chains at positions 12 and 16
  MOD_RES (29)..(29): C-terminal amidation
HSEGTFTSDYSKYLDERRAQDFVQWLMNT

SEQ ID NO: 142 - protein, 29 aa, Artificial Sequence
  glucagon analog
  MISC_FEATURE (12)..(16): Lactam ring between side chains at positions 12 and 16
  MOD_RES (29)..(29): C-terminal amidation
HSEGTFTSDYSKYLDERRAKDFVQWLMNT

SEQ ID NO: 143 - protein, 29 aa, Artificial Sequence
  glucagon analog
  MISC_FEATURE (16)..(20): Lactam ring between side chains at positions 16 and 20
  MOD_RES (29)..(29): C-terminal amidation
HSEGTFTSDYSKYLDKRRAEDFVQWLMNT

SEQ ID NO: 144 - protein, 29 aa, Artificial Sequence
  glucagon analog
  MOD_RES (29)..(29): C-terminal amidation
HSEGTFTSDYSKYLDERAAKDFVQWLMNT

SEQ ID NO: 145 - protein, 29 aa, Artificial Sequence
  glucagon analog
  MISC_FEATURE (16)..(20): Lactam ring between side chains at positions 16 and 20
  MOD_RES (29)..(29): C-terminal amidation
HSEGTFTSDYSKYLDERAAKDFVQWLMNT

SEQ ID NO: 146 - protein, 29 aa, Artificial Sequence
  glucagon analog
  MISC_FEATURE (12)..(16): Lactam ring between side chains at positions 12 and 16
  MOD_RES (29)..(29): C-terminal amidation
HSEGTFTSDYSKYLDERAAQDFVQWLMNT

SEQ ID NO: 147 - protein, 29 aa, Artificial Sequence
  glucagon analog
  MISC_FEATURE (12)..(16): Lactam ring between side chains at positions 12 and 16
  MOD_RES (29)..(29): C-terminal amidation
HSEGTFTSDYSKYLDERAAKDFVQWLMNT

SEQ ID NO: 148 - protein, 29 aa, Artificial Sequence
  glucagon analog
  MISC_FEATURE (16)..(20): Lactam ring between side chains at positions 16 and 20
  MOD_RES (29)..(29): C-terminal amidation
HSEGTFTSDYSKYLDKRAAEDFVQWLMNT

SEQ ID NO: 149 - protein, 29 aa, Artificial Sequence
  glucagon analog
  MOD_RES (29)..(29): C-terminal amidation
HSEGTFTSDYSKYLDEQAAKEFIAWLMNT

SEQ ID NO: 150 - protein, 29 aa, Artificial Sequence
  glucagon analog
  MISC_FEATURE (12)..(16): Lactam ring between side chains at positions 12 and 16
  MOD_RES (29)..(29): C-terminal amidation
HSEGTFTSDYSKYLDEQAAKEFIAWLMNT

SEQ ID NO: 151 - protein, 29 aa, Artificial Sequence
  glucagon analog
  MISC_FEATURE (16)..(20): Lactam ring between side chains at positions 16 and 20
  MOD_RES (29)..(29): C-terminal amidation
HSEGTFTSDYSKYLDEQAAKEFIAWLMNT

SEQ ID NO: 152 - protein, 29 aa, Artificial Sequence
  glucagon analog
  MOD_RES (29)..(29): C-terminal amidation
HSEGTFTSDYSKYLDEQAAKEFIAWLVKG

SEQ ID NO: 153 - protein, 29 aa, Artificial Sequence
  glucagon analog
  MISC_FEATURE (12)..(16): Lactam ring between side chains at positions 12 and 16
  MOD_RES (29)..(29): C-terminal amidation
HSEGTFTSDYSKYLDEQAAKEFIAWLVKG

SEQ ID NO: 154 - protein, 29 aa, Artificial Sequence
  glucagon analog
  MISC_FEATURE (16)..(20): Lactam ring between side chains at positions 16 and 20
  MOD_RES (29)..(29): C-terminal amidation
HSEGTFTSDYSKYLDEQAAKEFIAWLVKG

SEQ ID NO: 155 - protein, 29 aa, Artificial Sequence
  glucagon analog
  MOD_RES (1)..(1): (Des-amino)His
  MOD_RES (29)..(29): C-terminal amidation
XSEGTFTSDYSKYLDERRAQDFVQWLMNT

SEQ ID NO: 156 - protein, 29 aa, Artificial Sequence
  glucagon analog
  MOD_RES (1)..(1): (Des-amino)His
  MOD_RES (29)..(29): C-terminal amidation
XSEGTFTSDYSKYLDERRAKDFVQWLMNT

SEQ ID NO: 157 - protein, 29 aa, Artificial Sequence
  glucagon analog
  MOD_RES (1)..(1): (Des-amino)His
  MISC_FEATURE (16)..(20): Lactam ring between side chains at positions 16 and 20
  MOD_RES (29)..(29): C-terminal amidation
XSEGTFTSDYSKYLDERRAKDFVQWLMNT

SEQ ID NO: 158 - protein, 29 aa, Artificial Sequence
  glucagon analog
  MOD_RES (1)..(1): (Des-amino)His
  MISC_FEATURE (12)..(16): Lactam ring between side chains at positions 12 and 16
  MOD_RES (29)..(29): C-terminal amidation
XSEGTFTSDYSKYLDERRAQDFVQWLMNT

SEQ ID NO: 159 - protein, 29 aa, Artificial Sequence
  glucagon analog
  MOD_RES (1)..(1): (Des-amino)His
  MISC_FEATURE (12)..(16): Lactam ring between side chains at positions 12 and 16
  MOD_RES (29)..(29): C-terminal amidation
XSEGTFTSDYSKYLDERRAKDFVQWLMNT

SEQ ID NO: 160 - protein, 29 aa, Artificial Sequence
  glucagon analog
  MOD_RES (1)..(1): (Des-amino)His
  MISC_FEATURE (16)..(20): Lactam ring between side chains at positions 16 and 20
  MOD_RES (29)..(29): C-terminal amidation
XSEGTFTSDYSKYLDKRRAEDFVQWLMNT

SEQ ID NO: 161 - protein, 29 aa, Artificial Sequence
  glucagon analog
  MOD_RES (1)..(1): (Des-amino)His
  MOD_RES (29)..(29): C-terminal amidation
XSEGTFTSDYSKYLDERAAKDFVQWLMNT

SEQ ID NO: 162 - protein, 29 aa, Artificial Sequence
  glucagon analog
  MOD_RES (1)..(1): (Des-amino)His
  MISC_FEATURE (16)..(20): Lactam ring between side chains at positions 16 and 20
  MOD_RES (29)..(29): C-terminal amidation
XSEGTFTSDYSKYLDERAAKDFVQWLMNT

SEQ ID NO: 163 - protein, 29 aa, Artificial Sequence
  glucagon analog
  MOD_RES (1)..(1): (Des-amino)His
  MISC_FEATURE (12)..(16): Lactam ring between side chains at positions 12 and 16
  MOD_RES (29)..(29): C-terminal amidation
XSEGTFTSDYSKYLDERAAQDFVQWLMNT

SEQ ID NO: 164 - protein, 29 aa, Artificial Sequence
  glucagon analog
  MOD_RES (1)..(1): (Des-amino)His
  MISC_FEATURE (12)..(16): Lactam ring between side chains at positions 12 and 16
  MOD_RES (29)..(29): C-terminal amidation
XSEGTFTSDYSKYLDERAAKDFVQWLMNT

SEQ ID NO: 165 - protein, 29 aa, Artificial Sequence
  glucagon analog
  MOD_RES (1)..(1): (Des-amino)His
  MISC_FEATURE (16)..(20): Lactam ring between side chains at positions 16 and 20
  MOD_RES (29)..(29): C-terminal amidation
XSEGTFTSDYSKYLDKRAAEDFVQWLMNT

SEQ ID NO: 166 - protein, 29 aa, Artificial Sequence
  glucagon analog
  MOD_RES (1)..(1): (Des-amino)His
  MOD_RES (29)..(29): C-terminal amidation
XSEGTFTSDYSKYLDEQAAKEFIAWLMNT

SEQ ID NO: 167 - protein, 29 aa, Artificial Sequence
  glucagon analog
  MOD_RES (1)..(1): (Des-amino)His
  MISC_FEATURE (12)..(16): Lactam ring between side chains at positions 12 and 16
  MOD_RES (29)..(29): C-terminal amidation
XSEGTFTSDYSKYLDEQAAKEFIAWLMNT

SEQ ID NO: 168 - protein, 29 aa, Artificial Sequence
  glucagon analog
  MOD_RES (1)..(1): (Des-amino)His
  MISC_FEATURE (16)..(20): Lactam ring between side chains at positions 16 and 20
  MOD_RES (29)..(29): C-terminal amidation
XSEGTFTSDYSKYLDEQAAKEFIAWLMNT

SEQ ID NO: 169 - protein, 29 aa, Artificial Sequence
  glucagon analog
  MOD_RES (1)..(1): (Des-amino)His
  MOD_RES (29)..(29): C-terminal amidation
XSEGTFTSDYSKYLDEQAAKEFIAWLVKG

SEQ ID NO: 170 - protein, 29 aa, Artificial Sequence
  glucagon analog
  MOD_RES (1)..(1): (Des-amino)His
  MISC_FEATURE (12)..(16): Lactam ring between side chains at positions 12 and 16
  MOD_RES (29)..(29): C-terminal amidation
XSEGTFTSDYSKYLDEQAAKEFIAWLVKG

SEQ ID NO: 171 - protein, 29 aa, Artificial Sequence
  glucagon analog
  MOD_RES (1)..(1): (Des-amino)His
  MISC_FEATURE (16)..(20): Lactam ring between side chains at positions 16 and 20
  MOD_RES (29)..(29): C-terminal amidation
XSEGTFTSDYSKYLDEQAAKEFIAWLVKG

SEQ ID NO: 172 - protein, 29 aa, Artificial Sequence
  glucagon analog
  MOD_RES (2)..(2): Xaa is AIB
  MOD_RES (29)..(29): C-terminal amidation
HXEGTFTSDYSKYLDERRAQDFVQWLMNT

SEQ ID NO: 173 - protein, 29 aa, Artificial Sequence
  glucagon analog
  MOD_RES (2)..(2): Xaa is AIB
  MOD_RES (29)..(29): C-terminal amidation
HXEGTFTSDYSKYLDERRAKDFVQWLMNT

SEQ ID NO: 174 - protein, 29 aa, Artificial Sequence
  glucagon analog
  MOD_RES (2)..(2): Xaa is AIB
  MISC_FEATURE (16)..(20): Lactam ring between side chains at positions 16 and 20
  MOD_RES (29)..(29): C-terminal amidation
HXEGTFTSDYSKYLDERRAKDFVQWLMNT

SEQ ID NO: 175 - protein, 29 aa, Artificial Sequence
  glucagon analog
  MOD_RES (2)..(2): Xaa is AIB
  MISC_FEATURE (12)..(16): Lactam ring between side chains at positions 12 and 16
  MOD_RES (29)..(29): C-terminal amidation
HXEGTFTSDYSKYLDERRAQDFVQWLMNT

SEQ ID NO: 176 - protein, 29 aa, Artificial Sequence
  glucagon analog
  MOD_RES (2)..(2): Xaa is AIB
  MISC_FEATURE (12)..(16): Lactam ring between side chains at positions 12 and 16
  MOD_RES (29)..(29): C-terminal amidation
HXEGTFTSDYSKYLDERRAKDFVQWLMNT

SEQ ID NO: 177 - protein, 29 aa, Artificial Sequence
  glucagon analog
  MOD_RES (2)..(2): Xaa is AIB
  MISC_FEATURE (16)..(20): Lactam ring between side chains at positions 16 and 20
  MOD_RES (29)..(29): C-terminal amidation
HXEGTFTSDYSKYLDKRRAEDFVQWLMNT

SEQ ID NO: 178 - protein, 29 aa, Artificial Sequence
  glucagon analog
  MOD_RES (2)..(2): Xaa is AIB
  MOD_RES (29)..(29): C-terminal amidation
HXEGTFTSDYSKYLDERAAKDFVQWLMNT

SEQ ID NO: 179 - protein, 29 aa, Artificial Sequence
  glucagon analog
  MOD_RES (2)..(2): Xaa is AIB
  MISC_FEATURE (16)..(20): Lactam ring between side chains at positions 16 and 20
  MOD_RES (29)..(29): C-terminal amidation
HXEGTFTSDYSKYLDERAAKDFVQWLMNT

SEQ ID NO: 180 - protein, 29 aa, Artificial Sequence
  glucagon analog
  MOD_RES (2)..(2): Xaa is AIB
  MISC_FEATURE (12)..(16): Lactam ring between side chains at positions 12 and 16
  MOD_RES (29)..(29): C-terminal amidation
HXEGTFTSDYSKYLDERAAQDFVQWLMNT

SEQ ID NO: 181 - protein, 29 aa, Artificial Sequence
  glucagon analog
  MOD_RES (2)..(2): Xaa is AIB
  MISC_FEATURE (12)..(16): Lactam ring between side chains at positions 12 and 16
  MOD_RES (29)..(29): C-terminal amidation
HXEGTFTSDYSKYLDERAAKDFVQWLMNT

SEQ ID NO: 182 - protein, 29 aa, Artificial Sequence
  glucagon analog
  MOD_RES (2)..(2): Xaa is AIB
  MISC_FEATURE (16)..(20): Lactam ring between side chains at positions 16 and 20
  MOD_RES (29)..(29): C-terminal amidation
HXEGTFTSDYSKYLDKRAAEDFVQWLMNT

SEQ ID NO: 183 - protein, 29 aa, Artificial Sequence
  glucagon analog
  MOD_RES (2)..(2): Xaa is AIB
  MOD_RES (29)..(29): C-terminal amidation
HXEGTFTSDYSKYLDEQAAKEFIAWLMNT

SEQ ID NO: 184 - protein, 29 aa, Artificial Sequence
  glucagon analog
  MOD_RES (2)..(2): Xaa is AIB
  MISC_FEATURE (12)..(16): Lactam ring between side chains at positions 12 and 16
  MOD_RES (29)..(29): C-terminal amidation
HXEGTFTSDYSKYLDEQAAKEFIAWLMNT

SEQ ID NO: 185 - protein, 29 aa, Artificial Sequence
  glucagon analog
  MOD_RES (2)..(2): Xaa is AIB
  MISC_FEATURE (16)..(20): Lactam ring between side chains at positions 16 and 20
  MOD_RES (29)..(29): C-terminal amidation
HXEGTFTSDYSKYLDEQAAKEFIAWLMNT

SEQ ID NO: 186 - protein, 29 aa, Artificial Sequence
  glucagon analog
  MOD_RES (2)..(2): Xaa is AIB
  MOD_RES (29)..(29): C-terminal amidation
HXEGTFTSDYSKYLDEQAAKEFIAWLVKG

SEQ ID NO: 187 - protein, 29 aa, Artificial Sequence
  glucagon analog
  MOD_RES (2)..(2): Xaa is AIB
  MISC_FEATURE (12)..(16): Lactam ring between side chains at positions 12 and 16
  MOD_RES (29)..(29): C-terminal amidation
HXEGTFTSDYSKYLDEQAAKEFIAWLVKG

SEQ ID NO: 188 - protein, 29 aa, Artificial Sequence
  glucagon analog
  MOD_RES (2)..(2): Xaa is AIB
  MISC_FEATURE (16)..(20): Lactam ring between side chains at positions 16 and 20
  MOD_RES (29)..(29): C-terminal amidation
HXEGTFTSDYSKYLDEQAAKEFIAWLVKG

SEQ ID NO: 189 - protein, 29 aa, Artificial Sequence
  glucagon analog
  MOD_RES (2)..(2): Xaa is D-Ala
  MOD_RES (29)..(29): C-terminal amidation
HXEGTFTSDYSKYLDERRAQDFVQWLMNT

SEQ ID NO: 190 - protein, 29 aa, Artificial Sequence
  glucagon analog
  MOD_RES (2)..(2): Xaa is D-Ala
  MOD_RES (29)..(29): C-terminal amidation
HXEGTFTSDYSKYLDERRAKDFVQWLMNT

SEQ ID NO: 191 - protein, 29 aa, Artificial Sequence
  glucagon analog
  MOD_RES (2)..(2): Xaa is D-Ala
  MISC_FEATURE (16)..(20): Lactam ring between side chains at positions 16 and 20
  MOD_RES (29)..(29): C-terminal amidation
HXEGTFTSDYSKYLDERRAKDFVQWLMNT

SEQ ID NO: 192 - protein, 29 aa, Artificial Sequence
  glucagon analog
  MOD_RES (2)..(2): Xaa is D-Ala
  MISC_FEATURE (12)..(16): Lactam ring between side chains at positions 12 and 16
  MOD_RES (29)..(29): C-terminal amidation
HXEGTFTSDYSKYLDERRAQDFVQWLMNT

SEQ ID NO: 193 - protein, 29 aa, Artificial Sequence
  glucagon analog
  MOD_RES (2)..(2): Xaa is D-Ala
  MISC_FEATURE (12)..(16): Lactam ring between side chains at positions 12 and 16
  MOD_RES (29)..(29): C-terminal amidation
HXEGTFTSDYSKYLDERRAKDFVQWLMNT

SEQ ID NO: 194 - protein, 29 aa, Artificial Sequence
  glucagon analog
  MOD_RES (2)..(2): Xaa is D-Ala
  MISC_FEATURE (16)..(20): Lactam ring between side chains at positions 16 and 20
  MOD_RES (29)..(29): C-terminal amidation
HXEGTFTSDYSKYLDKRRAEDFVQWLMNT

SEQ ID NO: 195 - protein, 29 aa, Artificial Sequence
  glucagon analog
  MOD_RES (2)..(2): Xaa is D-Ala
  MISC_FEATURE (16)..(20): Lactam ring between side chains at positions 16 and 20
  MOD_RES (29)..(29): C-terminal amidation
HXEGTFTSDYSKYLDERAAKDFVQWLMNT

SEQ ID NO: 196 - protein, 29 aa, Artificial Sequence
  glucagon analog
  MOD_RES (2)..(2): Xaa is D-Ala
  MISC_FEATURE (16)..(20): Lactam ring between side chains at positions 16 and 20
  MOD_RES (29)..(29): C-terminal amidation
HXEGTFTSDYSKYLDERAAKDFVQWLMNT

SEQ ID NO: 197 - protein, 29 aa, Artificial Sequence
  glucagon analog
  MOD_RES (2)..(2): Xaa is D-Ala
  MISC_FEATURE (12)..(16): Lactam ring between side chains at positions 12 and 16
  MOD_RES (29)..(29): C-terminal amidation
HXEGTFTSDYSKYLDERAAQDFVQWLMNT

SEQ ID NO: 198 - protein, 29 aa, Artificial Sequence
  glucagon analog
  MOD_RES (2)..(2): Xaa is D-Ala
  MISC_FEATURE (12)..(16): Lactam ring between side chains at positions 12 and 16
  MOD_RES (29)..(29): C-terminal amidation
HXEGTFTSDYSKYLDERAAKDFVQWLMNT

SEQ ID NO: 199 - protein, 29 aa, Artificial Sequence
  glucagon analog
  MOD_RES (2)..(2): Xaa is D-Ala
  MISC_FEATURE (16)..(20): Lactam ring between side chains at positions 16 and 20
  MOD_RES (29)..(29): C-terminal amidation
HXEGTFTSDYSKYLDKRAAEDFVQWLMNT

SEQ ID NO: 200 - protein, 29 aa, Artificial Sequence
  glucagon analog
  MOD_RES (2)..(2): Xaa is D-Ala
  MOD_RES (29)..(29): C-terminal amidation
HXEGTFTSDYSKYLDEQAAKEFIAWLMNT

SEQ ID NO: 201 - protein, 29 aa, Artificial Sequence
  glucagon analog
  MOD_RES (2)..(2): Xaa is D-Ala
  MISC_FEATURE (12)..(16): Lactam ring between side chains at positions 12 and 16
  MOD_RES (29)..(29): C-terminal amidation
HXEGTFTSDYSKYLDEQAAKEFIAWLMNT

SEQ ID NO: 202 - protein, 29 aa, Artificial Sequence
  glucagon analog
  MOD_RES (2)..(2): Xaa is D-Ala
  MISC_FEATURE (16)..(20): Lactam ring between side chains at positions 16 and 20
  MOD_RES (29)..(29): C-terminal amidation
HXEGTFTSDYSKYLDEQAAKEFIAWLMNT

SEQ ID NO: 203 - protein, 29 aa, Artificial Sequence
  glucagon analog
  MOD_RES (2)..(2): Xaa is D-Ala
  MOD_RES (29)..(29): C-terminal amidation
HXEGTFTSDYSKYLDEQAAKEFIAWLVKG

SEQ ID NO: 204 - protein, 29 aa, Artificial Sequence
  glucagon analog
  MOD_RES (2)..(2): Xaa is D-Ala
  MISC_FEATURE (12)..(16): Lactam ring between side chains at positions 12 and 16
  MOD_RES (29)..(29): C-terminal amidation
HXEGTFTSDYSKYLDEQAAKEFIAWLVKG

SEQ ID NO: 205 - protein, 29 aa, Artificial Sequence
  glucagon analog
  MOD_RES (2)..(2): Xaa is D-Ala
  MISC_FEATURE (16)..(20): Lactam ring between side chains at positions 16 and 20
  MOD_RES (29)..(29): Lactam ring between side chains at positions 16 and 20
HXEGTFTSDYSKYLDEQAAKEFIAWLVKG

SEQ ID NO: 206 - protein, 29 aa, Artificial Sequence
  glucagon analog
  MOD_RES (24)..(24): PEGYLATION
  MOD_RES (29)..(29): C-terminal amidation
HSQGTFTSDYSKYLDERRAQDFVCWLMNT

SEQ ID NO: 207 - protein, 29 aa, Artificial Sequence
  glucagon analog
  MOD_RES (24)..(24): PEGYLATION
  MOD_RES (29)..(29): C-terminal amidation
HSQGTFTSDYSKYLDERRAKDFVCWLMNT

SEQ ID NO: 208 - protein, 29 aa, Artificial Sequence
  glucagon analog
  MISC_FEATURE (16)..(20): Lactam ring between side chains at positions 16 and 20
  MOD_RES (24)..(24): PEGYLATION
  MOD_RES (29)..(29): C-terminal amidation
HSQGTFTSDYSKYLDERRAKDFVCWLMNT

SEQ ID NO: 209 - protein, 29 aa, Artificial Sequence
  glucagon analog
  MISC_FEATURE (12)..(16): Lactam ring between side chains at positions 12 and 16
  MOD_RES (24)..(24): PEGYLATION
  MOD_RES (29)..(29): C-terminal amidation
HSQGTFTSDYSKYLDERRAQDFVCWLMNT

SEQ ID NO: 210 - protein, 29 aa, Artificial Sequence
  glucagon analog
  MISC_FEATURE (12)..(16): Lactam ring between side chains at positions 12 and 16
  MOD_RES (24)..(24): PEGYLATION
  MOD_RES (29)..(29): C-terminal amidation
HSQGTFTSDYSKYLDERRAKDFVCWLMNT

SEQ ID NO: 211 - protein, 29 aa, Artificial Sequence
  glucagon analog
  MISC_FEATURE (16)..(20): Lactam ring between side chains at positions 16 and 20
  MOD_RES (24)..(24): PEGYLATION
  MOD_RES (29)..(29): C-terminal amidation
HSQGTFTSDYSKYLDKRRAEDFVCWLMNT

SEQ ID NO: 212 - protein, 29 aa, Artificial Sequence
  glucagon analog
  MISC_FEATURE (16)..(20): Lactam ring between side chains at positions 16 and 20
  MOD_RES (24)..(24): PEGYLATION
  MOD_RES (29)..(29): C-terminal amidation
HSQGTFTSDYSKYLDERAAKDFVCWLMNT

SEQ ID NO: 213 - protein, 29 aa, Artificial Sequence
  glucagon analog
  MISC_FEATURE (16)..(20): Lactam ring between side chains at positions 16 and 20
  MOD_RES (24)..(24): PEGYLATION
  MOD_RES (29)..(29): C-terminal amidation
HSQGTFTSDYSKYLDERAAKDFVCWLMNT

SEQ ID NO: 214 - protein, 29 aa, Artificial Sequence
  glucagon analog
  MISC_FEATURE (12)..(16): Lactam ring between side chains at positions 12 and 16
  MOD_RES (24)..(24): PEGYLATION
  MOD_RES (29)..(29): C-terminal amidation
HSQGTFTSDYSKYLDERAAQDFVCWLMNT

SEQ ID NO: 215 - protein, 29 aa, Artificial Sequence
  glucagon analog
  MISC_FEATURE (12)..(16): Lactam ring between side chains at positions 12 and 16
  MOD_RES (24)..(24): PEGYLATION
  MOD_RES (29)..(29): C-terminal amidation
HSQGTFTSDYSKYLDERAAKDFVCWLMNT

SEQ ID NO: 216 - protein, 29 aa, Artificial Sequence
  glucagon analog
  MISC_FEATURE (16)..(20): Lactam ring between side chains at positions 16 and 20
  MOD_RES (24)..(24): PEGYLATION
  MOD_RES (29)..(29): C-terminal amidation
HSQGTFTSDYSKYLDKRAAEDFVCWLMNT

SEQ ID NO: 217 - protein, 29 aa, Artificial Sequence
  glucagon analog
  MOD_RES (24)..(24): PEGYLATION
  MOD_RES (29)..(29): C-terminal amidation
HSQGTFTSDYSKYLDEQAAKEFICWLMNT

SEQ ID NO: 218 - protein, 29 aa, Artificial Sequence
  glucagon analog
  MISC_FEATURE (12)..(16): Lactam ring between side chains at positions 12 and 16
  MOD_RES (24)..(24): PEGYLATION
  MOD_RES (29)..(29): C-terminal amidation
HSQGTFTSDYSKYLDEQAAKEFICWLMNT

SEQ ID NO: 219 - protein, 29 aa, Artificial Sequence
  glucagon analog
  MISC_FEATURE (16)..(20): Lactam ring between side chains at positions 16 and 20
  MOD_RES (24)..(24): PEGYLATION
  MOD_RES (29)..(29): C-terminal amidation
HSQGTFTSDYSKYLDEQAAKEFICWLMNT

SEQ ID NO: 220 - protein, 29 aa, Artificial Sequence
  glucagon analog
  MOD_RES (24)..(24): PEGYLATION
  MOD_RES (29)..(29): C-terminal amidation
HSQGTFTSDYSKYLDEQAAKEFICWLVKG

SEQ ID NO: 221 - protein, 29 aa, Artificial Sequence
  glucagon analog
  MISC_FEATURE (12)..(16): Lactam ring between side chains at positions 12 and 16
  MOD_RES (24)..(24): PEGYLATION
  MOD_RES (29)..(29): C-terminal amidation
HSQGTFTSDYSKYLDEQAAKEFICWLVKG

SEQ ID NO: 222 - protein, 29 aa, Artificial Sequence
  glucagon analog
  MISC_FEATURE (16)..(20): Lactam ring between side chains at positions 16 and 20
  MOD_RES (24)..(24): PEGYLATION
  MOD_RES (29)..(29): C-terminal amidation
HSQGTFTSDYSKYLDEQAAKEFICWLVKG

SEQ ID NO: 223 - protein, 29 aa, Artificial Sequence
  glucagon analog
  MOD_RES (1)..(1): Xaa is (Des-amino)His
  MOD_RES (24)..(24): PEGYLATION
  MOD_RES (29)..(29): C-terminal amidation
XSQGTFTSDYSKYLDERRAQDFVCWLMNT

SEQ ID NO: 224 - protein, 29 aa, Artificial Sequence
  glucagon analog
  MOD_RES (1)..(1): Xaa is (Des-amino)His
  MOD_RES (24)..(24): PEGYLATION
  MOD_RES (29)..(29): C-terminal amidation
XSQGTFTSDYSKYLDERRAKDFVCWLMNT

SEQ ID NO: 225 - protein, 29 aa, Artificial Sequence
  glucagon analog
  MOD_RES (1)..(1): Xaa is (Des-amino)His
  MISC_FEATURE (16)..(20): Lactam ring between side chains at positions 16 and 20
  MOD_RES (24)..(24): PEGYLATION
  MOD_RES (29)..(29): C-terminal amidation
XSQGTFTSDYSKYLDERRAKDFVCWLMNT

SEQ ID NO: 226 - protein, 29 aa, Artificial Sequence
  glucagon analog
  MOD_RES (1)..(1): Xaa is (Des-amino)His
  MISC_FEATURE (12)..(16): Lactam ring between side chains at positions 12 and 16
  MOD_RES (24)..(24): PEGYLATION
  MOD_RES (29)..(29): C-terminal amidation
XSQGTFTSDYSKYLDERRAQDFVCWLMNT

SEQ ID NO: 227 - protein, 29 aa, Artificial Sequence
  glucagon analog
  MOD_RES (1)..(1): Xaa is (Des-amino)His
  MISC_FEATURE (12)..(16): Lactam ring between side chains at positions 12 and 16
  MOD_RES (24)..(24): PEGYLATION
  MOD_RES (29)..(29): C-terminal amidation
XSQGTFTSDYSKYLDERRAKDFVCWLMNT

SEQ ID NO: 228 - protein, 29 aa, Artificial Sequence
  glucagon analog
  MOD_RES (1)..(1): Xaa is (Des-amino)His
  MISC_FEATURE (16)..(20): Lactam ring between side chains at positions 16 and 20
  MOD_RES (24)..(24): PEGYLATION
  MOD_RES (29)..(29): C-terminal amidation
XSQGTFTSDYSKYLDKRRAEDFVCWLMNT

SEQ ID NO: 229 - protein, 29 aa, Artificial Sequence
  glucagon analog
  MOD_RES (1)..(1): Xaa is (Des-amino)His
  MOD_RES (24)..(24): PEGYLATION
  MOD_RES (29)..(29): C-terminal amidation
XSQGTFTSDYSKYLDERAAKDFVCWLMNT

SEQ ID NO: 230 - protein, 29 aa, Artificial Sequence
  glucagon analog
  MOD_RES (1)..(1): Xaa is (Des-amino)His
  MISC_FEATURE (16)..(20): Lactam ring between side chains at positions 16 and 20
  MOD_RES (24)..(24): PEGYLATION
  MOD_RES (29)..(29): C-terminal amidation
XSQGTFTSDYSKYLDERAAKDFVCWLMNT

SEQ ID NO: 231 - protein, 29 aa, Artificial Sequence
  glucagon analog
  MOD_RES (1)..(1): Xaa is (Des-amino)His
  MISC_FEATURE (12)..(16): Lactam ring between side chains at positions 12 and 16
  MOD_RES (24)..(24): PEGYLATION
  MOD_RES (29)..(29): C-terminal amidation
XSQGTFTSDYSKYLDERAAQDFVCWLMNT

SEQ ID NO: 232 - protein, 29 aa, Artificial Sequence
  glucagon analog
  MOD_RES (1)..(1): Xaa is (Des-amino)His
  MISC_FEATURE (12)..(16): Lactam ring between side chains at positions 12 and 16
  MOD_RES (24)..(24): PEGYLATION
  MOD_RES (29)..(29): C-terminal amidation
XSQGTFTSDYSKYLDERAAKDFVCWLMNT

SEQ ID NO: 233 - protein, 29 aa, Artificial Sequence
  glucagon analog
  MOD_RES (1)..(1): Xaa is (Des-amino)His
  MISC_FEATURE (16)..(20): Lactam ring between side chains at positions 16 and 20
  MOD_RES (24)..(24): PEGYLATION
  MOD_RES (29)..(29): C-terminal amidation
XSQGTFTSDYSKYLDKRAAEDFVCWLMNT

SEQ ID NO: 234 - protein, 29 aa, Artificial Sequence
  glucagon analog
  MOD_RES (1)..(1): Xaa is (Des-amino)His
  MOD_RES (24)..(24): PEGYLATION
  MOD_RES (29)..(29): C-terminal amidation
XSQGTFTSDYSKYLDEQAAKEFICWLMNT

SEQ ID NO: 235 - protein, 29 aa, Artificial Sequence
  glucagon analog
  MOD_RES (1)..(1): XAa is (Des-amino)His
  MISC_FEATURE (12)..(16): Lactam ring between side chains at positions 12 and 16
  MOD_RES (24)..(24): PEGYLATION
  MOD_RES (29)..(29): C-terminal amidation
XSQGTFTSDYSKYLDEQAAKEFICWLMNT

SEQ ID NO: 236 - protein, 29 aa, Artificial Sequence
  glucagon analog
  MOD_RES (1)..(1): Xaa is (Des-amino)His
  MISC_FEATURE (16)..(20): Lactam ring between side chains at positions 16 and 20
  MOD_RES (24)..(24): PEGYLATION
  MOD_RES (29)..(29): C-terminal amidation
XSQGTFTSDYSKYLDEQAAKEFICWLMNT

SEQ ID NO: 237 - protein, 29 aa, Artificial Sequence
  glucagon analog
  MOD_RES (1)..(1): Xaa is (Des-amino)His
  MOD_RES (24)..(24): PEGYLATION
  MOD_RES (29)..(29): C-terminal amidation
XSQGTFTSDYSKYLDEQAAKEFICWLVKG

SEQ ID NO: 238 - protein, 29 aa, Artificial Sequence
  glucagon analog
  MOD_RES (1)..(1): Xaa is (Des-amino)His
  MISC_FEATURE (12)..(16): Lactam ring between side chains at positions 12 and 16
  MOD_RES (24)..(24): PEGYLATION
  MOD_RES (29)..(29): C-terminal amidation
XSQGTFTSDYSKYLDEQAAKEFICWLVKG

SEQ ID NO: 239 - protein, 29 aa, Artificial Sequence
  glucagon analog
  MOD_RES (1)..(1): Xaa is (Des-amino)His
  MISC_FEATURE (16)..(20): Lactam ring between side chains at positions 16 and 20
  MOD_RES (24)..(24): PEGYLATION
  MOD_RES (29)..(29): C-terminal amidation
XSQGTFTSDYSKYLDEQAAKEFICWLVKG

SEQ ID NO: 240 - protein, 29 aa, Artificial Sequence
  Synthetic peptide
  MOD_RES (2)..(2): Xaa is AIB
  MOD_RES (24)..(24): PEGYLATION
  MOD_RES (29)..(29): C-terminal amidation
HXQGTFTSDYSKYLDERRAQDFVCWLMNT

SEQ ID NO: 241 - protein, 29 aa, Artificial Sequence
  Synthetic peptide
  MOD_RES (2)..(2): Xaa is AIB
  MOD_RES (24)..(24): PEGYLATION
  MOD_RES (29)..(29): C-terminal amidation
HXQGTFTSDYSKYLDERRAKDFVCWLMNT

SEQ ID NO: 242 - protein, 29 aa, Artificial Sequence
  Synthetic peptide
  MOD_RES (2)..(2): Xaa is AIB
  MISC_FEATURE (16)..(20): Lactam ring between side chains at positions 16 and 20
  MOD_RES (24)..(24): PEGYLATION
  MOD_RES (29)..(29): C-terminal amidation
HXQGTFTSDYSKYLDERRAKDFVCWLMNT

SEQ ID NO: 243 - protein, 29 aa, Artificial Sequence
  Synthetic peptide
  MOD_RES (2)..(2): Xaa is AIB
  MISC_FEATURE (12)..(16): Lactam ring between side chains at positions 12 and 16
  MOD_RES (24)..(24): PEGYLATION
  MOD_RES (29)..(29): C-terminal amidation
HXQGTFTSDYSKYLDERRAQDFVCWLMNT

SEQ ID NO: 244 - protein, 29 aa, Artificial Sequence
  Synthetic peptide
  MOD_RES (2)..(2): Xaa is AIB
  MISC_FEATURE (12)..(16): Lactam ring between side chains at positions 12 and 16
  MOD_RES (24)..(24): PEGYLATION
  MOD_RES (29)..(29): C-terminal amidation
HXQGTFTSDYSKYLDERRAKDFVCWLMNT

SEQ ID NO: 245 - protein, 29 aa, Artificial Sequence
  Synthetic peptide
  MOD_RES (2)..(2): Xaa is AIB
  MISC_FEATURE (16)..(20): Lactam ring side chains at positions 16 and 20
  MOD_RES (24)..(24): PEGYLATION
  MOD_RES (29)..(29): C-terminal amidation
HXQGTFTSDYSKYLDKRRAEDFVCWLMNT

SEQ ID NO: 246 - protein, 29 aa, Artificial Sequence
  Synthetic peptide
  MOD_RES (2)..(2): Xaa is AIB
  MOD_RES (24)..(24): PEGYLATION
  MOD_RES (29)..(29): C-terminal amidation
HXQGTFTSDYSKYLDERAAKDFVCWLMNT

SEQ ID NO: 247 - protein, 29 aa, Artificial Sequence
  Synthetic peptide
  MOD_RES (2)..(2): Xaa is AIB
  MISC_FEATURE (16)..(20): Lactam ring between side chains at positions 16 and 20
  MOD_RES (24)..(24): PEGYLATION
  MOD_RES (29)..(29): C-terminal amidation
HXQGTFTSDYSKYLDERAAKDFVCWLMNT

SEQ ID NO: 248 - protein, 29 aa, Artificial Sequence
  Synthetic peptide
  MOD_RES (2)..(2): Xaa is AIB
  MISC_FEATURE (12)..(16): Lactam ring between side chains at positions 12 and 16
  MOD_RES (24)..(24): PEGYLATION
  MOD_RES (29)..(29): C-terminal amidation
HXQGTFTSDYSKYLDERAAQDFVCWLMNT

SEQ ID NO: 249 - protein, 29 aa, Artificial Sequence
  Synthetic peptide
  MOD_RES (2)..(2): Xaa is AIB
  MISC_FEATURE (12)..(16): Lactam ring between side chains at positions 12 and 16
  MOD_RES (24)..(24): PEGYLATION
  MOD_RES (29)..(29): C-terminal amidation
HXQGTFTSDYSKYLDERAAKDFVCWLMNT

SEQ ID NO: 250 - protein, 29 aa, Artificial Sequence
  Synthetic peptide
  MOD_RES (2)..(2): Xaa is AIB
  MISC_FEATURE (12)..(16): Lactam ring between side chains at positions 12 and 16
  MOD_RES (24)..(24): PEGYLATION
  MOD_RES (29)..(29): C-terminal amidation
HXQGTFTSDYSKYLDKRAAEDFVCWLMNT

SEQ ID NO: 251 - protein, 29 aa, Artificial Sequence
  Synthetic peptide
  MOD_RES (2)..(2): Xaa is AIB
  MOD_RES (24)..(24): PEGYLATION
  MOD_RES (29)..(29): C-terminal amidation
HXQGTFTSDYSKYLDEQAAKEFICWLMNT

SEQ ID NO: 252 - protein, 29 aa, Artificial Sequence
  Synthetic peptide
  misc_feature (2)..(2): Xaa can be any naturally occurring amino acid
HXQGTFTSDYSKYLDEQAAKEFICWLMNT

SEQ ID NO: 253 - protein, 29 aa, Artificial Sequence
  Synthetic peptide
  MOD_RES (2)..(2): Xaa is AIB
  MISC_FEATURE (16)..(20): Lactam ring between side chains at positions 16 and 20
  MOD_RES (24)..(24): PEGYLATION
  MOD_RES (29)..(29): C-terminal amidation
HXQGTFTSDYSKYLDEQAAKEFICWLMNT

SEQ ID NO: 254 - protein, 29 aa, Artificial Sequence
  Synthetic peptide
  MOD_RES (2)..(2): Xaa is AIB
  MOD_RES (24)..(24): PEGYLATION
  MOD_RES (29)..(29): C-terminal amidation
HXQGTFTSDYSKYLDEQAAKEFICWLVKG

SEQ ID NO: 255 - protein, 29 aa, Artificial Sequence
  Synthetic peptide
  MOD_RES (2)..(2): Xaa is AIB
  MISC_FEATURE (12)..(16): Lactam ring between side chains at positions 12 and 16
  MOD_RES (24)..(24): PEGYLATION
  MOD_RES (29)..(29): C-terminal amidation
HXQGTFTSDYSKYLDEQAAKEFICWLVKG

SEQ ID NO: 256 - protein, 29 aa, Artificial Sequence
  Synthetic peptide
  MOD_RES (2)..(2): Xaa is AIB
  MISC_FEATURE (16)..(20): Lactam ring between side chains at positions 16 and 20
  MOD_RES (24)..(24): PEGYLATION
  MOD_RES (29)..(29): C-terminal amidation
HXQGTFTSDYSKYLDEQAAKEFICWLVKG

SEQ ID NO: 257 - protein, 29 aa, Artificial Sequence
  Synthetic peptide
  MOD_RES (2)..(2): Xaa is D-Ala
  MOD_RES (24)..(24): PEGYLATION
  MOD_RES (29)..(29): C-terminal amidation
HXQGTFTSDYSKYLDERRAQDFVCWLMNT

SEQ ID NO: 258 - protein, 29 aa, Artificial Sequence
  Synthetic peptide
  MOD_RES (2)..(2): Xaa is D-Ala
  MOD_RES (24)..(24): PEGYLATION
  MOD_RES (29)..(29): C-terminal amidation
HXQGTFTSDYSKYLDERRAKDFVCWLMNT

SEQ ID NO: 259 - protein, 29 aa, Artificial Sequence
  Synthetic peptide
  MOD_RES (2)..(2): Xaa is D-Ala
  MISC_FEATURE (16)..(20): Lactam ring between side chains at positions 16 and 20
  MOD_RES (24)..(24): PEGYLATION
  MOD_RES (29)..(29): C-terminal amidation
HXQGTFTSDYSKYLDERRAKDFVCWLMNT

SEQ ID NO: 260 - protein, 29 aa, Artificial Sequence
  Synthetic peptide
  MOD_RES (2)..(2): Xaa is D-Ala
  MISC_FEATURE (12)..(16): Lactam ring between side chrains at positions 12 and 16
  MOD_RES (24)..(24): PEGYLATION
  MOD_RES (29)..(29): C-terminal amidation
HXQGTFTSDYSKYLDERRAQDFVCWLMNT

SEQ ID NO: 261 - protein, 29 aa, Artificial Sequence
  Synthetic peptide
  MOD_RES (2)..(2): Xaa is D-Ala
  MISC_FEATURE (12)..(16): Lactam ring between side chains at positions 12 and 16
  MOD_RES (24)..(24): PEGYLATION
  MOD_RES (29)..(29): C-terminal amidation
HXQGTFTSDYSKYLDERRAKDFVCWLMNT

SEQ ID NO: 262 - protein, 29 aa, Artificial Sequence
  Synthetic peptide
  MOD_RES (2)..(2): Xaa is D-Ala
  MISC_FEATURE (16)..(20): Lactam ring between side chains at positions 16 and 20
  MOD_RES (24)..(24): PEGYLATION
  MOD_RES (29)..(29): C-terminal amidation
HXQGTFTSDYSKYLDKRRAEDFVCWLMNT

SEQ ID NO: 263 - protein, 29 aa, Artificial Sequence
  Synthetic peptide
  MOD_RES (2)..(2): Xaa is D-Ala
  MOD_RES (24)..(24): PEGYLATION
  MOD_RES (29)..(29): C-terminal amidation
HXQGTFTSDYSKYLDERAAKDFVCWLMNT

SEQ ID NO: 264 - protein, 29 aa, Artificial Sequence
  Synthetic peptide
  MOD_RES (2)..(2): Xaa is D-Ala
  MISC_FEATURE (16)..(20): Lactam ring between side chains at positions 16 and 20
  MOD_RES (24)..(24): PEGYLATION
  MOD_RES (29)..(29): C-terminal amidation
HXQGTFTSDYSKYLDERAAKDFVCWLMNT

SEQ ID NO: 265 - protein, 29 aa, Artificial Sequence
  Synthetic peptide
  MOD_RES (2)..(2): Xaa is D-Ala
  MISC_FEATURE (12)..(16): Lactam ring between side chains at positions 12 and 16
  MOD_RES (24)..(24): PEGYLATION
  MOD_RES (29)..(29): C-terminal amidation
HXQGTFTSDYSKYLDERAAQDFVCWLMNT

SEQ ID NO: 266 - protein, 29 aa, Artificial Sequence
  Synthetic peptide
  MOD_RES (2)..(2): Xaa is D-Ala
  MISC_FEATURE (12)..(16): Lactam ring betwee side chains at positions 12 and 16
  MOD_RES (24)..(24): PEGYLATION
  MOD_RES (29)..(29): C-terminal amidation
HXQGTFTSDYSKYLDERAAKDFVCWLMNT

SEQ ID NO: 267 - protein, 29 aa, Artificial Sequence
  Synthetic peptide
  MOD_RES (2)..(2): Xaa is D-Ala
  MISC_FEATURE (16)..(20): Lactam ring between side chains at positions 16 and 20
  MOD_RES (24)..(24): PEGYLATION
  MOD_RES (29)..(29): C-terminal amidation
HXQGTFTSDYSKYLDKRAAEDFVCWLMNT

SEQ ID NO: 268 - protein, 29 aa, Artificial Sequence
  Synthetic peptide
  MOD_RES (2)..(2): Xaa is D-Ala
  MOD_RES (24)..(24): PEGYLATION
  MOD_RES (29)..(29): C-terminal amidation
HXQGTFTSDYSKYLDEQAAKEFICWLMNT

SEQ ID NO: 269 - protein, 29 aa, Artificial Sequence
  Synthetic peptide
  MOD_RES (2)..(2): Xaa is D-Ala
  MISC_FEATURE (12)..(16): Lactam ring betwee side chains at positions 12 and 16
  MOD_RES (24)..(24): PEGYLATION
  MOD_RES (29)..(29): C-terminal amidation
HXQGTFTSDYSKYLDEQAAKEFICWLMNT

SEQ ID NO: 270 - protein, 29 aa, Artificial Sequence
  Synthetic peptide
  MOD_RES (2)..(2): Xaa is D-Ala
  MISC_FEATURE (16)..(20): Lactam ring betwee side chains at positions 16 and 20
  MOD_RES (24)..(24): PEGYLATION
  MOD_RES (29)..(29): C-terminal amidation
HXQGTFTSDYSKYLDEQAAKEFICWLMNT

SEQ ID NO: 271 - protein, 29 aa, Artificial Sequence
  Synthetic peptide
  MOD_RES (2)..(2): Xaa is D-Ala
  MOD_RES (24)..(24): PEGYLATION
  MOD_RES (29)..(29): C-terminal amidation
HXQGTFTSDYSKYLDEQAAKEFICWLVKG

SEQ ID NO: 272 - protein, 29 aa, Artificial Sequence
  Synthetic peptide
  MOD_RES (2)..(2): Xaa is D-Ala
  MISC_FEATURE (12)..(16): Lactam ring between side chains at positions 12 and 16
  MOD_RES (24)..(24): PEGYLATION
  MOD_RES (29)..(29): C-terminal midation
HXQGTFTSDYSKYLDEQAAKEFICWLVKG

SEQ ID NO: 273 - protein, 29 aa, Artificial Sequence
  Synthetic peptide
  MOD_RES (2)..(2): Xaa is D-Ala
  MISC_FEATURE (16)..(20): Lactam ring between side chains at positions 16 and 20
  MOD_RES (24)..(24): PEGYLATION
  MOD_RES (29)..(29): C-terminal amidation
HXQGTFTSDYSKYLDEQAAKEFICWLVKG

SEQ ID NO: 274 - protein, 29 aa, Artificial Sequence
  Synthetic peptide
  MOD_RES (24)..(24): PEGYLATION
  MOD_RES (29)..(29): C-terminal amidation
HSEGTFTSDYSKYLDERRAQDFVCWLMNT

SEQ ID NO: 275 - protein, 29 aa, Artificial Sequence
  Synthetic peptide
  MOD_RES (24)..(24): PEGYLATION
  MOD_RES (29)..(29): C-terminal amidation
HSEGTFTSDYSKYLDERRAKDFVCWLMNT

SEQ ID NO: 276 - protein, 29 aa, Artificial Sequence
  Synthetic peptide
  MISC_FEATURE (16)..(20): Lactam ring between side chains at positions 16 and 20
  MOD_RES (24)..(24): PEGYLATION
  MOD_RES (29)..(29): C-terminal amidation
HSEGTFTSDYSKYLDERRAKDFVCWLMNT

SEQ ID NO: 277 - protein, 29 aa, Artificial Sequence
  Synthetic peptide
  MISC_FEATURE (12)..(16): Lactam ring between side chains at positions 12 and 16
  MOD_RES (24)..(24): PEGYLATION
  MOD_RES (29)..(29): C-terminal amidation
HSEGTFTSDYSKYLDERRAQDFVCWLMNT

SEQ ID NO: 278 - protein, 29 aa, Artificial Sequence
  Synthetic peptide
  MISC_FEATURE (12)..(16): Lactam ring between side chains at positions 12 and 16
  MOD_RES (24)..(24): PEGYLATION
  MOD_RES (29)..(29): C-terminal amidation
HSEGTFTSDYSKYLDERRAKDFVCWLMNT

SEQ ID NO: 279 - protein, 29 aa, Artificial Sequence
  Synthetic peptide
  MISC_FEATURE (16)..(20): Lactam ring between side chains at positions 16 and 20
  MOD_RES (24)..(24): PEGYLATION
  MOD_RES (29)..(29): C-terminal amidation
HSEGTFTSDYSKYLDKRRAEDFVCWLMNT

SEQ ID NO: 280 - protein, 29 aa, Artificial Sequence
  Synthetic peptide
  MOD_RES (24)..(24): PEGYLATION
  MOD_RES (29)..(29): C-terminal amidation
HSEGTFTSDYSKYLDERAAKDFVCWLMNT

SEQ ID NO: 281 - protein, 29 aa, Artificial Sequence
  Synthetic peptide
  MISC_FEATURE (16)..(20): Lactam ring between side chains at positions 16 and 20
  MOD_RES (24)..(24): PEGYLATION
  MOD_RES (29)..(29): C-terminal amidation
HSEGTFTSDYSKYLDERAAKDFVCWLMNT

SEQ ID NO: 282 - protein, 29 aa, Artificial Sequence
  Synthetic peptide
  MISC_FEATURE (12)..(16): Lactam ring between side chains at positions 12 and 16
  MOD_RES (24)..(24): PEGYLATION
  MOD_RES (29)..(29): C-terminal amidation
HSEGTFTSDYSKYLDERAAQDFVCWLMNT

SEQ ID NO: 283 - protein, 29 aa, Artificial Sequence
  Synthetic peptide
  MISC_FEATURE (12)..(16): Lactam ring between side chains at positions 12 and 16
  MOD_RES (24)..(24): PEGYLATION
  MOD_RES (29)..(29): C-terminal amidation
HSEGTFTSDYSKYLDERAAKDFVCWLMNT

SEQ ID NO: 284 - protein, 29 aa, Artificial Sequence
  Synthetic peptide
  MISC_FEATURE (16)..(20): Lactam ring between side chains at positions 16 and 20
  MOD_RES (24)..(24): PEGYLATION
  MOD_RES (29)..(29): C-terminal amidation
HSEGTFTSDYSKYLDKRAAEDFVCWLMNT

SEQ ID NO: 285 - protein, 29 aa, Artificial Sequence
  Synthetic peptide
  MOD_RES (24)..(24): PEGYLATION
  MOD_RES (29)..(29): C-terminal amidation
HSEGTFTSDYSKYLDEQAAKEFICWLMNT

SEQ ID NO: 286 - protein, 29 aa, Artificial Sequence
  Synthetic peptide
  MISC_FEATURE (12)..(16): Lactam ring between side chains at positions 12 and 16
  MOD_RES (24)..(24): PEGYLATION
  MOD_RES (29)..(29): C-terminal amidation
HSEGTFTSDYSKYLDEQAAKEFICWLMNT

SEQ ID NO: 287 - protein, 29 aa, Artificial Sequence
  Synthetic peptide
  MISC_FEATURE (16)..(20): Lactam ring between side chain at positions 16 and 20
  MOD_RES (24)..(24): PEGYLATION
  MOD_RES (29)..(29): C-terminal amidation
HSEGTFTSDYSKYLDEQAAKEFICWLMNT

SEQ ID NO: 288 - protein, 29 aa, Artificial Sequence
  Synthetic peptide
  MOD_RES (24)..(24): PEGYLATION
  MOD_RES (29)..(29): C-terminal amidation
HSEGTFTSDYSKYLDEQAAKEFICWLVKG

SEQ ID NO: 289 - protein, 29 aa, Artificial Sequence
  Synthetic peptide
  MISC_FEATURE (12)..(16): Lactam ring between side chains at positions 12 and 16
  MOD_RES (24)..(24): PEGYLATION
  MOD_RES (29)..(29): C-terminal amidation
HSEGTFTSDYSKYLDEQAAKEFICWLVKG

SEQ ID NO: 290 - protein, 29 aa, Artificial Sequence
  Synthetic peptide
  MISC_FEATURE (16)..(20): Lactam ring between side chains at positions 16 and 20
  MOD_RES (24)..(24): PEGYLATION
  MOD_RES (29)..(29): C-terminal amidation
HSEGTFTSDYSKYLDEQAAKEFICWLVKG

SEQ ID NO: 291 - protein, 29 aa, Artificial Sequence
  Synthetic peptide
  MOD_RES (1)..(1): Xaa is (Des-amino)His
  MOD_RES (24)..(24): PEGYLATION
  MOD_RES (29)..(29): C-terminal amidation
XSEGTFTSDYSKYLDERRAQDFVCWLMNT

SEQ ID NO: 292 - protein, 29 aa, Artificial Sequence
  Synthetic peptide
  MOD_RES (1)..(1): Xaa is (Des-amino)His
  MOD_RES (24)..(24): PEGYLATION
  MOD_RES (29)..(29): C-terminal amidation
XSEGTFTSDYSKYLDERRAKDFVCWLMNT

SEQ ID NO: 293 - protein, 29 aa, Artificial Sequence
  Synthetic peptide
  MOD_RES (1)..(1): Xaa is (Des-amino)His
  MISC_FEATURE (16)..(20): Lactam ring between side chains at positions 16 and 20
  MOD_RES (24)..(24): PEGYLATION
  MOD_RES (29)..(29): C-terminal amidation
XSEGTFTSDYSKYLDERRAKDFVCWLMNT

SEQ ID NO: 294 - protein, 29 aa, Artificial Sequence
  Synthetic peptide
  MOD_RES (1)..(1): Xaa is (Des-amino)His
  MISC_FEATURE (12)..(16): Lactam ring between side chains at positions 12 and 16
  MOD_RES (24)..(24): PEGYLATION
  MOD_RES (29)..(29): C-terminal amidation
XSEGTFTSDYSKYLDERRAQDFVCWLMNT

SEQ ID NO: 295 - protein, 29 aa, Artificial Sequence
  Synthetic peptide
  MOD_RES (1)..(1): Xaa is (Des-amino)His
  MISC_FEATURE (12)..(16): Lactam ring between side chains at positions 12 and 16
  MOD_RES (24)..(24): PEGYLATION
  MOD_RES (29)..(29): C-terminal amidation
XSEGTFTSDYSKYLDERRAKDFVCWLMNT

SEQ ID NO: 296 - protein, 29 aa, Artificial Sequence
  Synthetic peptide
  MOD_RES (1)..(1): Xaa is (Des-amino)His
  MISC_FEATURE (16)..(20): Lactam ring between side chains at positions 16 and 20
  MOD_RES (24)..(24): PEGYLATION
  MOD_RES (29)..(29): C-terminal amidation
XSEGTFTSDYSKYLDKRRAEDFVCWLMNT

SEQ ID NO: 297 - protein, 29 aa, Artificial Sequence
  Synthetic peptide
  MOD_RES (1)..(1): Xaa is (Des-amino)His
  MOD_RES (24)..(24): PEGYLATION
  MOD_RES (29)..(29): C-terminal amidation
XSEGTFTSDYSKYLDERAAKDFVCWLMNT

SEQ ID NO: 298 - protein, 29 aa, Artificial Sequence
  Synthetic peptide
  MOD_RES (1)..(1): Xaa is (Des-amino)His
  MISC_FEATURE (16)..(20): Lactam ring between side chains at positions 16 and 20
  MOD_RES (24)..(24): PEGYLATION
  MOD_RES (29)..(29): C-terminal amidation
XSEGTFTSDYSKYLDERAAKDFVCWLMNT

SEQ ID NO: 299 - protein, 29 aa, Artificial Sequence
  Synthetic peptide
  MOD_RES (1)..(1): Xaa is (Des-amino)His
  MISC_FEATURE (12)..(16): Lactam ring between side chains at positions 12 and 16
  MOD_RES (24)..(24): PEGYLATION
  MOD_RES (29)..(29): C-terminal amidation
XSEGTFTSDYSKYLDERAAQDFVCWLMNT

SEQ ID NO: 300 - protein, 29 aa, Artificial Sequence
  Synthetic peptide
  MOD_RES (1)..(1): Xaa is (Des-amino)His
  MISC_FEATURE (12)..(16): Lactam ring between side chains at positions 12 and 16
  MOD_RES (24)..(24): PEGYLATION
  MOD_RES (29)..(29): C-terminal amidation
XSEGTFTSDYSKYLDERAAKDFVCWLMNT

SEQ ID NO: 301 - protein, 29 aa, Artificial Sequence
  Synthetic peptide
  MISC_FEATURE: c-term amidation
  MOD_RES (1)..(1): (Des-amino)His
  MISC_FEATURE (16)..(20): Lactam ring between side chains at positions 16 and 20
  MOD_RES (24)..(24): Cys-PEG
XSEGTFTSDYSKYLDKRAAEDFVCWLMNT

SEQ ID NO: 302 - protein, 29 aa, Artificial Sequence
  Synthetic peptide
  MISC_FEATURE: c-term amidation
  MOD_RES (1)..(1): (Des-amino)His
  MOD_RES (24)..(24): Cys-PEG
XSEGTFTSDYSKYLDEQAAKGFICWLMNT

SEQ ID NO: 303 - protein, 29 aa, Artificial Sequence
  Synthetic peptide
  MISC_FEATURE: c-term amidation
  MOD_RES (1)..(1): (Des-amino)His
  MISC_FEATURE (12)..(16): Lactam ring between side chains at positions 12 and 16
  MOD_RES (24)..(24): Cys-PEG
XSEGTFTSDYSKYLDEQAAKGFICWLMNT

SEQ ID NO: 304 - protein, 29 aa, Artificial Sequence
  Synthetic peptide
  MISC_FEATURE: c-term amidation
  MOD_RES (1)..(1): (Des-amino)His
  MISC_FEATURE (16)..(20): Lactam ring between side chains at positions 16 and 20
  MOD_RES (24)..(24): Cys-PEG
XSEGTFTSDYSKYLDEQAAKGFICWLMNT

SEQ ID NO: 305 - protein, 29 aa, Artificial Sequence
  Synthetic peptide
  MISC_FEATURE: c-term amidation
  MOD_RES (1)..(1): (des-amino)His
  MOD_RES (24)..(24): Cys-PEG
XSEGTFTSDYSKYLDEQAAKGFICWLVKG

SEQ ID NO: 306 - protein, 29 aa, Artificial Sequence
  Synthetic peptide
  MISC_FEATURE: c-term amidation
  MOD_RES (1)..(1): (Des-amino)His
  MISC_FEATURE (12)..(16): Lactam ring between side chains at positions 12 and 16
  MOD_RES (24)..(24): Cys-PEG
XSEGTFTSDYSKYLDEQAAKGFICWLVKG

SEQ ID NO: 307 - protein, 29 aa, Artificial Sequence
  Synthetic peptide
  MISC_FEATURE: c-term amidation
  MOD_RES (1)..(1): (Des-amino)His
  MISC_FEATURE (16)..(20): Lactam ring between side chains at positions 16 and 20
  MOD_RES (24)..(24): Cys-PEG
XSEGTFTSDYSKYLDEQAAKGFICWLVKG

SEQ ID NO: 308 - protein, 29 aa, Artificial Sequence
  Synthetic peptide
  MISC_FEATURE: c-term amidation
  MOD_RES (2)..(2): Aminoisobutyric acid
  MOD_RES (24)..(24): Cys-PEG
HXEGTFTSDYSKYLDERRAQDFVCWLMNT

SEQ ID NO: 309 - protein, 29 aa, Artificial Sequence
  Synthetic peptide
  MISC_FEATURE: c-term amidation
  MOD_RES (2)..(2): Aminoisobutyric acid
  MOD_RES (24)..(24): Cys-PEG
HXEGTFTSDYSKYLDERRAKDFVCWLMNT

SEQ ID NO: 310 - protein, 29 aa, Artificial Sequence
  Synthetic peptide
  MISC_FEATURE: c-term amidation
  MOD_RES (2)..(2): Aminoisobutyric acid
  MISC_FEATURE (16)..(20): Lactam ring between side chains at positions 16 and 20
  MOD_RES (24)..(24): Cys-PEG
HXEGTFTSDYSKYLDERRAKDFVCWLMNT

SEQ ID NO: 311 - protein, 29 aa, Artificial Sequence
  Synthetic peptide
  MISC_FEATURE: c-term amidation
  MOD_RES (2)..(2): Aminoisobutyric acid
  MISC_FEATURE (12)..(16): Lactam ring between side chain at positions 12 and 16
  MOD_RES (24)..(24): Cys-PEG
HXEGTFTSDYSKYLDERRAQDFVCWLMNT

SEQ ID NO: 312 - protein, 29 aa, Artificial Sequence
  Synthetic peptide
  MISC_FEATURE: c-term amidation
  MOD_RES (2)..(2): Aminoisobutyric acid
  MISC_FEATURE (12)..(16): Lactam ring between side chains at positions 12 and 16
  MOD_RES (24)..(24): Cys-PEG
HXEGTFTSDYSKYLDERRAKDFVCWLMNT

SEQ ID NO: 313 - protein, 29 aa, Artificial Sequence
  Synthetic peptide
  MISC_FEATURE: c-term amidation
  MOD_RES (2)..(2): Aminoisobutyric acid
  MISC_FEATURE (16)..(20): Lactam ring between side chains at positions 16 and 20
  MOD_RES (24)..(24): Cys-PEG
HXEGTFTSDYSKYLDKRRAEDFVCWLMNT

SEQ ID NO: 314 - protein, 29 aa, Artificial Sequence
  Synthetic peptide
  MISC_FEATURE: c-term amidation
  MOD_RES (2)..(2): Aminoisobutyric acid
  MOD_RES (24)..(24): Cys-PEG
HXEGTFTSDYSKYLDERAAKDFVCWLMNT

SEQ ID NO: 315 - protein, 29 aa, Artificial Sequence
  Synthetic peptide
  MISC_FEATURE: c-term amidation
  MOD_RES (2)..(2): Aminoisobutyric acid
  MISC_FEATURE (16)..(20): Lactam ring between seide chains at positions 16 and 20
  MOD_RES (24)..(24): Cys-PEG
HXEGTFTSDYSKYLDERAAKDFVCWLMNT

SEQ ID NO: 316 - protein, 29 aa, Artificial Sequence
  Synthetic peptide
  MISC_FEATURE: c-term amidation
  MOD_RES (2)..(2): Aminoisobutyric acid
  MISC_FEATURE (12)..(16): Lactam ring between side chains at positions 12 and 16
  MOD_RES (24)..(24): Cys-PEG
HXEGTFTSDYSKYLDERAAQDFVCWLMNT

SEQ ID NO: 317 - protein, 29 aa, Artificial Sequence
  Synthetic peptide
  MISC_FEATURE: c-term amidation
  MOD_RES (2)..(2): Aminoisobutyric acid
  MISC_FEATURE (12)..(16): Lactam ring between side chains at positions 12 and 16
  MOD_RES (24)..(24): Cys-PEG
HXEGTFTSDYSKYLDERAAKDFVCWLMNT

SEQ ID NO: 318 - protein, 29 aa, Artificial Sequence
  Synthetic peptide
  MISC_FEATURE: c-term amidation
  MOD_RES (2)..(2): Aminoisobutyric acid
  MISC_FEATURE (16)..(20): Lactam ring between side chains at positions 16 and 20
  MOD_RES (24)..(24): Cys-PEG
HXEGTFTSDYSKYLDKRAAEDFVCWLMNT

SEQ ID NO: 319 - protein, 29 aa, Artificial Sequence
  Synthetic peptide
  MISC_FEATURE: c-term amidation
  MOD_RES (2)..(2): Aminoisobutyric acid
  MOD_RES (24)..(24): Cys-PEG
HXEGTFTSDYSKYLDEQAAKEFICWLMNT

SEQ ID NO: 320 - protein, 29 aa, Artificial Sequence
  Synthetic peptide
  MISC_FEATURE: c-term amidation
  MOD_RES (2)..(2): Aminoisobutyric acid
  MISC_FEATURE (12)..(16): Lactam ring between side chains at positions 12 and 16
  MOD_RES (24)..(24): Cys-PEG
HXEGTFTSDYSKYLDEQAAKEFICWLMNT

SEQ ID NO: 321 - protein, 29 aa, Artificial Sequence
  Synthetic peptide
  MISC_FEATURE: c-term amidation
  MOD_RES (2)..(2): Aminoisobutyric acid
  MISC_FEATURE (16)..(20): Lactam ring between side chains at position 16 and 20
  MOD_RES (24)..(24): Cys-PEG
HXEGTFTSDYSKYLDEQAAKEFICWLMNT

SEQ ID NO: 322 - protein, 29 aa, Artificial Sequence
  Synthetic peptide
  MISC_FEATURE: c-term amidation
  MOD_RES (2)..(2): Aminoisobutyric acid
  MOD_RES (24)..(24): Cys-PEG
HXEGTFTSDYSKYLDEQAAKEFICWLVKG

SEQ ID NO: 323 - protein, 29 aa, Artificial Sequence
  Synthetic peptide
  MISC_FEATURE: c-term amidation
  MOD_RES (2)..(2): Aminoisobutyric acid
  MISC_FEATURE (12)..(16): Lactam ring between side chains at positions 12 and 16
  MOD_RES (24)..(24): Cys-PEG
HXEGTFTSDYSKYLDEQAAKEFICWLVKG

SEQ ID NO: 324 - protein, 29 aa, Artificial Sequence
  Synthetic peptide
  MISC_FEATURE: c-term amidation
  MOD_RES (2)..(2): Aminoisobutyric acid
  MISC_FEATURE (16)..(20): Lactam ring between side chains at position 16 and 20
  MOD_RES (24)..(24): Cys-PEG
HXEGTFTSDYSKYLDEQAAKEFICWLVKG

SEQ ID NO: 325 - protein, 29 aa, Artificial Sequence
  Synthetic peptide
  MISC_FEATURE: c-term amidation
  MOD_RES (2)..(2): D-Ala
  MOD_RES (24)..(24): Cys-PEG
HXEGTFTSDYSKYLDERRAQDFVCWLMNT

SEQ ID NO: 326 - protein, 29 aa, Artificial Sequence
  Synthetic peptide
  MISC_FEATURE: c-term amidation
  MOD_RES (2)..(2): D-Ala
  MOD_RES (24)..(24): Cys-PEG
HXEGTFTSDYSKYLDERRAKDFVCWLMNT

SEQ ID NO: 327 - protein, 29 aa, Artificial Sequence
  Synthetic peptide
  MISC_FEATURE: c-term amidation
  MOD_RES (2)..(2): D-Ala
  MISC_FEATURE (16)..(20): Lactam ring between side chains at positions 16 and 20
  MOD_RES (24)..(24): Cys-PEG
HXEGTFTSDYSKYLDERRAKDFVCWLMNT

SEQ ID NO: 328 - protein, 29 aa, Artificial Sequence
  Synthetic peptide
  MISC_FEATURE: c-term amidation
  MOD_RES (2)..(2): D-Ala
  MISC_FEATURE (12)..(16): Lactam between side chains at positions 12 and 16
  MOD_RES (24)..(24): Cys-PEG
HXEGTFTSDYSKYLDERRAQDFVCWLMNT

SEQ ID NO: 329 - protein, 29 aa, Artificial Sequence
  Synthetic peptide
  MISC_FEATURE: c-term amidation
  MOD_RES (2)..(2): D-Ala
  MISC_FEATURE (12)..(16): Lactam ring between side chains at positions 12 and 16
  MOD_RES (24)..(24): Cys-PEG
HXEGTFTSDYSKYLDERRAKDFVCWLMNT

SEQ ID NO: 330 - protein, 29 aa, Artificial Sequence
  Synthetic peptide
  MISC_FEATURE: c-term amidation
  MOD_RES (2)..(2): D-Ala
  MISC_FEATURE (16)..(20): Lactam ring between side chains at positions 16 and 20
  MOD_RES (24)..(24): Cys-PEG
HXEGTFTSDYSKYLDKRRAEDFVCWLMNT

SEQ ID NO: 331 - protein, 29 aa, Artificial Sequence
  Synthetic peptide
  MISC_FEATURE: c-term amidation
  MOD_RES (2)..(2): D-Ala
  MOD_RES (24)..(24): Cys-PEG
HXEGTFTSDYSKYLDERAAKDFVCWLMNT

SEQ ID NO: 332 - protein, 29 aa, Artificial Sequence
  Synthetic peptide
  MISC_FEATURE: c-term amidation
  MOD_RES (2)..(2): D-Ala
  MISC_FEATURE (16)..(20): Lactam ring between side chains at positions 16 and 20
  MOD_RES (24)..(24): Cys-PEG
HXEGTFTSDYSKYLDERAAKDFVCWLMNT

SEQ ID NO: 333 - protein, 29 aa, Artificial Sequence
  Synthetic peptide
  MISC_FEATURE: c-term amidation
  MOD_RES (2)..(2): D-Ala
  MISC_FEATURE (12)..(16): Lactam ring between side chains at positions 12 and 16
  MOD_RES (24)..(24): Cys-PEG
HXEGTFTSDYSKYLDERAAQDFVCWLMNT

SEQ ID NO: 334 - protein, 29 aa, Artificial Sequence
  Synthetic peptide
  MISC_FEATURE: c-term amidation
  MOD_RES (2)..(2): D-Ala
  MISC_FEATURE (12)..(16): Lactam ring between side chains at positions 12 and 16
  MOD_RES (24)..(24): Cys-PEG
HXEGTFTSDYSKYLDERAAKDFVCWLMNT

SEQ ID NO: 335 - protein, 29 aa, Artificial Sequence
  Synthetic peptide
  MISC_FEATURE: c-term amidation
  MOD_RES (2)..(2): D-Ala
  MISC_FEATURE (12)..(16): Lactam ring between side chainst at positions 16 and 20
  MOD_RES (24)..(24): Cys-PEG
HXEGTFTSDYSKYLDKRAAEDFVCWLMNT

SEQ ID NO: 336 - protein, 29 aa, Artificial Sequence
  Synthetic peptide
  MISC_FEATURE: c-term amidation
  MOD_RES (2)..(2): D-Ala
  MOD_RES (24)..(24): Cys-PEG
HXEGTFTSDYSKYLDEQAAKEFICWLMNT

SEQ ID NO: 337 - protein, 29 aa, Artificial Sequence
  Synthetic peptide
  MISC_FEATURE: c-term amidation
  MOD_RES (2)..(2): D-Ala
  MISC_FEATURE (12)..(16): Lactam ring between side chains at positions 12 and 16
  MOD_RES (24)..(24): Cys-PEG
HXEGTFTSDYSKYLDEQAAKEFICWLMNT

SEQ ID NO: 338 - protein, 29 aa, Artificial Sequence
  Synthetic peptide
  MISC_FEATURE: c-term amidation
  MOD_RES (2)..(2): D-Ala
  MISC_FEATURE (16)..(20): Lactam right between side chains at positions 16 and 20
  MOD_RES (24)..(24): Cys-PEG
HXEGTFTSDYSKYLDEQAAKEFICWLMNT

SEQ ID NO: 339 - protein, 29 aa, Artificial Sequence
  Synthetic peptide
  MISC_FEATURE: c-term amidation
  MOD_RES (2)..(2): D-Ala
  MOD_RES (24)..(24): Cys-PEG
HXEGTFTSDYSKYLDEQAAKEFICWLVKG

SEQ ID NO: 340 - protein, 29 aa, Artificial Sequence
  Synthetic peptide
  MISC_FEATURE: c-term amidation
  MOD_RES (2)..(2): D-Ala
  MISC_FEATURE (12)..(16): Lactam ring between side chains at positions 12 and 16
  MOD_RES (24)..(24): Cys-PEG
HXEGTFTSDYSKYLDEQAAKEFICWLVKG

SEQ ID NO: 341 - protein, 29 aa, Artificial Sequence
  Synthetic peptide
  MISC_FEATURE: c-term amidation
  MOD_RES (2)..(2): D-Ala
  MISC_FEATURE (16)..(20): Lactam ring between side chains at positions 16 and 20
  MOD_RES (24)..(24): Cys-PEG
HXEGTFTSDYSKYLDEQAAKEFICWLVKG

SEQ ID NO: 342 - protein, 29 aa, Artificial Sequence
  Synthetic peptide
  MISC_FEATURE: c-term amidation
  MOD_RES (16)..(16): Cys-PEG
HSQGTFTSDYSKYLDCRRAKDFVQWLMNT

SEQ ID NO: 343 - protein, 29 aa, Artificial Sequence
  Synthetic peptide
  MISC_FEATURE: c-term amidation
  MOD_RES (16)..(16): Cys-PEG
HSQGTFTSDYSKYLDCRAAKDFVQWLMNT

SEQ ID NO: 344 - protein, 29 aa, Artificial Sequence
  Synthetic peptide
  MISC_FEATURE: c-term amidation
  MOD_RES (16)..(16): Cys-PEG
HSQGTFTSDYSKYLDCQAAKEFIAWLMNT

SEQ ID NO: 345 - protein, 29 aa, Artificial Sequence
  Synthetic peptide
  MISC_FEATURE: c-term amidation
  MOD_RES (16)..(16): Cys-PEG
HSQGTFTSDYSKYLDCQAAKEFIAWLVKG

SEQ ID NO: 346 - protein, 29 aa, Artificial Sequence
  Synthetic peptide
  MISC_FEATURE: c-term amidation
  MOD_RES (1)..(1): (Des-amino)His
  MOD_RES (16)..(16): Cys-PEG
XSQGTFTSDYSKYLDCRRAKDFVQWLMNT

SEQ ID NO: 347 - protein, 29 aa, Artificial Sequence
  Synthetic peptide
  MISC_FEATURE: c-term amidation
  MOD_RES (1)..(1): (Des-amino)His
  MOD_RES (16)..(16): Cys-PEG
XSQGTFTSDYSKYLDCRAAKDFVQWLMNT

SEQ ID NO: 348 - protein, 29 aa, Artificial Sequence
  Synthetic peptide
  MISC_FEATURE: c-term amidation
  MOD_RES (1)..(1): (Des-amino)His
  MOD_RES (16)..(16): Cys-PEG
XSQGTFTSDYSKYLDCQAAKEFIAWLMNT

SEQ ID NO: 349 - protein, 29 aa, Artificial Sequence
  Synthetic peptide
  MISC_FEATURE: c-term amidation
  MOD_RES (1)..(1): (Des-amino)His
  MOD_RES (16)..(16): Cys-PEG
XSQGTFTSDYSKYLDCQAAKEFIAWLVKG

SEQ ID NO: 350 - protein, 29 aa, Artificial Sequence
  Synthetic peptide
  MISC_FEATURE: c-term amidation
  MOD_RES (1)..(1): (Des-amino)His
  MOD_RES (16)..(16): Cys-PEG
XSQGTFTSDYSKYLDCQAAKEFIAWLMNT

SEQ ID NO: 351 - protein, 29 aa, Artificial Sequence
  Synthetic peptide
  MISC_FEATURE: c-term amidation
  MOD_RES (2)..(2): Aminoisobutyric acid
  MOD_RES (16)..(16): Cys-PEG
HXQGTFTSDYSKYLDCRAAKDFVQWLMNT

SEQ ID NO: 352 - protein, 29 aa, Artificial Sequence
  Synthetic peptide
  MISC_FEATURE: c-term amidation
  MOD_RES (2)..(2): Aminoisobutyric acid
  MOD_RES (16)..(16): Cys-PEG
HXQGTFTSDYSKYLDCQAAKEFIAWLMNT

SEQ ID NO: 353 - protein, 29 aa, Artificial Sequence
  Synthetic peptide
  MISC_FEATURE: c-term amidation
  MOD_RES (2)..(2): Aminoisobutyric acid
  MOD_RES (16)..(16): Cys-PEG
HXQGTFTSDYSKYLDCQAAKEFIAWLVKG

SEQ ID NO: 354 - protein, 29 aa, Artificial Sequence
  Synthetic peptide
  MISC_FEATURE: c-term amidation
  MOD_RES (2)..(2): D-Ala
  MOD_RES (16)..(16): Cys-PEG
HXQGTFTSDYSKYLDCRRAKDFVQWLMNT

SEQ ID NO: 355 - protein, 29 aa, Artificial Sequence
  Synthetic peptide
  MISC_FEATURE: c-term amidation
  MOD_RES (2)..(2): D-Ala
  MOD_RES (16)..(16): Cys-PEG
HXQGTFTSDYSKYLDCRAAKDFVQWLMNT

SEQ ID NO: 356 - protein, 29 aa, Artificial Sequence
  Synthetic peptide
  MISC_FEATURE: c-term amidation
  MOD_RES (2)..(2): D-Ala
  MOD_RES (16)..(16): Cys-PEG
HXQGTFTSDYSKYLDCQAAKEFIAWLMNT

SEQ ID NO: 357 - protein, 29 aa, Artificial Sequence
  Synthetic peptide
  MISC_FEATURE: c-term amidation
  MOD_RES (2)..(2): D-Ala
  MOD_RES (16)..(16): Cys-PEG
HXQGTFTSDYSKYLDCQAAKEFIAWLVKG

SEQ ID NO: 358 - protein, 29 aa, Artificial Sequence
  Synthetic peptide
  MISC_FEATURE: c-term amidation
  MOD_RES (16)..(16): Cys-PEG
HSEGTFTSDYSKYLDCRRAKDFVQWLMNT

SEQ ID NO: 359 - protein, 29 aa, Artificial Sequence
  Synthetic peptide
  MISC_FEATURE: c-term amidation
  MOD_RES (16)..(16): Cys-PEG
HSEGTFTSDYSKYLDCRAAKDFVQWLMNT

SEQ ID NO: 360 - protein, 29 aa, Artificial Sequence
  Synthetic peptide
  MISC_FEATURE: c-term amidation
  MOD_RES (16)..(16): Cys-PEG
HSEGTFTSDYSKYLDCQAAKEFIAWLMNT

SEQ ID NO: 361 - protein, 29 aa, Artificial Sequence
  Synthetic peptide
  MISC_FEATURE: c-term amidation
  MOD_RES (16)..(16): Cys-PEG
HSEGTFTSDYSKYLDCQAAKEFIAWLVKG

SEQ ID NO: 362 - protein, 29 aa, Artificial Sequence
  Synthetic peptide
  MISC_FEATURE: c-term amidation
  MOD_RES (1)..(1): (Des-amino)His
  MOD_RES (16)..(16): Cys-PEG
XSEGTFTSDYSKYLDCRRAKDFVQWLMNT

SEQ ID NO: 363 - protein, 29 aa, Artificial Sequence
  Synthetic peptide
  MISC_FEATURE: c-term amidation
  MOD_RES (1)..(1): (Des-amino)His
  MOD_RES (16)..(16): Cys-PEG
XSEGTFTSDYSKYLDCRAAKDFVQWLMNT

SEQ ID NO: 364 - protein, 29 aa, Artificial Sequence
  Synthetic peptide
  MISC_FEATURE: c-term amidation
  MOD_RES (1)..(1): (Des-amino)His
  MOD_RES (16)..(16): Cys-PEG
XSEGTFTSDYSKYLDCQAAKEFIAWLMNT

SEQ ID NO: 365 - protein, 29 aa, Artificial Sequence
  Synthetic peptide
  MISC_FEATURE: c-term amidation
  MOD_RES (1)..(1): (Des-amino)His
  MOD_RES (16)..(16): Cys-PEG
XSEGTFTSDYSKYLDCQAAKEFIAWLVKG

SEQ ID NO: 366 - protein, 29 aa, Artificial Sequence
  Synthetic peptide
  MISC_FEATURE: c-term amidation
  MOD_RES (2)..(2): D-Ala
  MOD_RES (16)..(16): Cys-PEG
HXEGTFTSDYSKYLDCRRAKDFVQWLMNT

SEQ ID NO: 367 - protein, 29 aa, Artificial Sequence
  Synthetic peptide
  MISC_FEATURE: c-term amidation
  MOD_RES (2)..(2): D-Ala
  MOD_RES (16)..(16): Cys-PEG
HXEGTFTSDYSKYLDCRAAKDFVQWLMNT

SEQ ID NO: 368 - protein, 29 aa, Artificial Sequence
  Synthetic peptide
  MISC_FEATURE: c-term amidation
  MOD_RES (2)..(2): D-Ala
  MOD_RES (16)..(16): Cys-PEG
HXEGTFTSDYSKYLDCQAAKEFIAWLMNT

SEQ ID NO: 369 - protein, 29 aa, Artificial Sequence
  Synthetic peptide
  MISC_FEATURE: c-term amidation
  MOD_RES (2)..(2): D-Ala
  MOD_RES (16)..(16): Cys-PEG
HXEGTFTSDYSKYLDCQAAKEFIAWLVKG

SEQ ID NO: 370 - protein, 29 aa, Artificial Sequence
  Synthetic peptide
  MISC_FEATURE: c-term amidation
  MOD_RES (2)..(2): D-Ala
  MOD_RES (16)..(16): Cys-PEG
HXEGTFTSDYSKYLDCRRAKDFVQWLMNT

SEQ ID NO: 371 - protein, 29 aa, Artificial Sequence
  Synthetic peptide
  MISC_FEATURE: c-term amidation
  MOD_RES (2)..(2): D-Ala
  MOD_RES (16)..(16): Cys-PEG
HXEGTFTSDYSKYLDCRAAKDFVQWLMNT

SEQ ID NO: 372 - protein, 29 aa, Artificial Sequence
  Synthetic peptide
  MISC_FEATURE: c-term amidation
  MOD_RES (2)..(2): D-Ala
  MOD_RES (16)..(16): Cys-PEG
HXEGTFTSDYSKYLDCQAAKEFIAWLMNT

SEQ ID NO: 373 - protein, 29 aa, Artificial Sequence
  Synthetic peptide
  MISC_FEATURE: c-term amidation
  MOD_RES (2)..(2): D-Ala
  MOD_RES (16)..(16): Cys-PEG
HXEGTFTSDYSKYLDCQAAKEFIAWLVKG

SEQ ID NO: 374 - protein, 29 aa, Artificial Sequence
  Synthetic peptide
  MISC_FEATURE: c-term amidation
HSQGTFTSDYSKYLDERRAQDFVQWLMDT

SEQ ID NO: 375 - protein, 29 aa, Artificial Sequence
  Synthetic peptide
  MISC_FEATURE: c-term amidation
HSQGTFTSDYSKYLDERRAKDFVQWLMDT

SEQ ID NO: 376 - protein, 29 aa, Artificial Sequence
  Synthetic peptide
  MISC_FEATURE: c-term amidation
  MISC_FEATURE (16)..(20): Lactam ring between side chains at positions 16 and 20
HSQGTFTSDYSKYLDERRAKDFVQWLMDT

SEQ ID NO: 377 - protein, 29 aa, Artificial Sequence
  Synthetic peptide
  MISC_FEATURE: c-term amidation
  MISC_FEATURE (12)..(16): Lactam ring between side chains at positions 12 and 16
HSQGTFTSDYSKYLDERRAQDFVQWLMDT

SEQ ID NO: 378 - protein, 29 aa, Artificial Sequence
  Synthetic peptide
  MISC_FEATURE: c-term amidation
  MISC_FEATURE (12)..(16): Lactam ring between side chains at positions 12 and 16
HSQGTFTSDYSKYLDERRAKDFVQWLMDT

SEQ ID NO: 379 - protein, 29 aa, Artificial Sequence
  Synthetic peptide
  MISC_FEATURE: c-term amidation
  MISC_FEATURE (16)..(20): Lactam ring between side chains at positions 16 and 20
HSQGTFTSDYSKYLDKRRAEDFVQWLMDT

SEQ ID NO: 380 - protein, 29 aa, Artificial Sequence
  Synthetic peptide
  MISC_FEATURE: c-term amidation
HSQGTFTSDYSKYLDERAAKDFVQWLMDT

SEQ ID NO: 381 - protein, 29 aa, Artificial Sequence
  Synthetic peptide
  MISC_FEATURE: c-term amidation; lactam ring between side chains at positions 16 and 20
HSQGTFTSDYSKYLDERAAKDFVQWLMDT

SEQ ID NO: 382 - protein, 29 aa, Artificial Sequence
  Synthetic peptide
  MISC_FEATURE: c-term amidation
  MISC_FEATURE (12)..(16): Lactam ring between side chains at positions 12 and 16
HSQGTFTSDYSKYLDERAAQDFVQWLMDT

SEQ ID NO: 383 - protein, 29 aa, Artificial Sequence
  Synthetic peptide
  MISC_FEATURE: c-term amidation
  MISC_FEATURE (12)..(16): Lactam ring between side chains at positions 12 and 16
HSQGTFTSDYSKYLDERAAKDFVQWLMDT

SEQ ID NO: 384 - protein, 29 aa, Artificial Sequence
  Synthetic peptide
  MISC_FEATURE: c-term amidation
  MISC_FEATURE (16)..(20): Lactam ring between side chains at positions 16 and 20
HSQGTFTSDYSKYLDKRAAEDFVQWLMDT

SEQ ID NO: 385 - protein, 29 aa, Artificial Sequence
  Synthetic peptide
  MISC_FEATURE: c-term amidation
HSQGTFTSDYSKYLDEQAAKEFIAWLMDT

SEQ ID NO: 386 - protein, 29 aa, Artificial Sequence
  Synthetic peptide
  MISC_FEATURE: c-term amidation
  MISC_FEATURE (12)..(16): Lactam ring between side chains at positions 12 and 16
HSQGTFTSDYSKYLDEQAAKEFIAWLMDT

SEQ ID NO: 387 - protein, 29 aa, Artificial Sequence
  Synthetic peptide
  MISC_FEATURE: c-term amidation
  MISC_FEATURE (16)..(20): Lactam ring between side chains at positions 16 and 20
HSQGTFTSDYSKYLDEQAAKEFIAWLMDT

SEQ ID NO: 388 - protein, 29 aa, Artificial Sequence
  Synthetic peptide
  MISC_FEATURE: c-term amidation
  MOD_RES (1)..(1): (Des-amino)His
XSQGTFTSDYSKYLDERRAQDFVQWLMDT

SEQ ID NO: 389 - protein, 29 aa, Artificial Sequence
  Synthetic peptide
  MISC_FEATURE: c-term amidation
  MOD_RES (1)..(1): (Des-amino)His
XSQGTFTSDYSKYLDERRAKDFVQWLMDT

SEQ ID NO: 390 - protein, 29 aa, Artificial Sequence
  Synthetic peptide
  MISC_FEATURE: c-term amidation
  MOD_RES (1)..(1): (Des-amino)His
  MISC_FEATURE (16)..(20): Lactam ring between side chains at positions 16 and 20
XSQGTFTSDYSKYLDERRAKDFVQWLMDT

SEQ ID NO: 391 - protein, 29 aa, Artificial Sequence
  Synthetic peptide
  MISC_FEATURE: c-term amidation
  MOD_RES (1)..(1): (Des-amino)His
  MISC_FEATURE (12)..(16): Lactam ring between side chains at positions 12 and 16
XSQGTFTSDYSKYLDERRAQDFVQWLMDT

SEQ ID NO: 392 - protein, 29 aa, Artificial Sequence
  Synthetic peptide
  misc_feature (1)..(1): Xaa can be any naturally occurring amino acid
XSQGTFTSDYSKYLDERRAKDFVQWLMDT

SEQ ID NO: 393 - protein, 29 aa, Artificial Sequence
  Synthetic peptide
  MISC_FEATURE: c-term amidation
  MOD_RES (1)..(1): (Des-amino)His
  MISC_FEATURE (16)..(20): Lactam ring between side chains at positions 16 and 20
XSQGTFTSDYSKYLDKRRAEDFVQWLMDT

SEQ ID NO: 394 - protein, 29 aa, Artificial Sequence
  Synthetic peptide
  MISC_FEATURE: c-term amidation
  MOD_RES (1)..(1): (Des-amino)His
XSQGTFTSDYSKYLDERAAKDFVQWLMDT

SEQ ID NO: 395 - protein, 29 aa, Artificial Sequence
  Synthetic peptide
  MISC_FEATURE: c-term amidation
  MOD_RES (1)..(1): (Des-amino)His
  MISC_FEATURE (16)..(20): Lactam ring between side chains at positions 16 and 20
XSQGTFTSDYSKYLDERAAKDFVQWLMDT

SEQ ID NO: 396 - protein, 29 aa, Artificial Sequence
  Synthetic peptide
  MISC_FEATURE: c-term amidation
  MOD_RES (1)..(1): (Des-amino)His
  MISC_FEATURE (12)..(16): Lactam ring between side chains at positions 12 and 16
XSQGTFTSDYSKYLDERAAQDFVQWLMDT

SEQ ID NO: 397 - protein, 29 aa, Artificial Sequence
  Synthetic peptide
  MISC_FEATURE: c-term amidation
  MOD_RES (1)..(1): (Des-amino)His
  MISC_FEATURE (12)..(16): Lactam ring between side chains at positions 12 and 16
XSQGTFTSDYSKYLDERAAKDFVQWLMDT

SEQ ID NO: 398 - protein, 29 aa, Artificial Sequence
  Synthetic peptide
  MISC_FEATURE: c-term amidation
  MOD_RES (1)..(1): (Des-amino)His
  MISC_FEATURE (16)..(20): Lactam ring between side chains at positions 16 and 20
XSQGTFTSDYSKYLDKRAAEDFVQWLMDT

SEQ ID NO: 399 - protein, 29 aa, Artificial Sequence
  Synthetic peptide
  MISC_FEATURE: c-term amidation
  MOD_RES (1)..(1): (Des-amino)His
XSQGTFTSDYSKYLDEQAAKEFIAWLMDT

SEQ ID NO: 400 - protein, 29 aa, Artificial Sequence
  Synthetic peptide
  MISC_FEATURE: c-term amidation
  MOD_RES (1)..(1): (Des-amino)His
  MISC_FEATURE (12)..(16): Lactam ring between side chains at positions 12 and 16
XSQGTFTSDYSKYLDEQAAKEFIAWLMDT

SEQ ID NO: 401 - protein, 29 aa, Artificial Sequence
  Synthetic peptide
  MISC_FEATURE: c-term amidation
  MOD_RES (1)..(1): (Des-amino)His
  MISC_FEATURE (16)..(20): Lactam ring between side chains at positions 16 and 20
XSQGTFTSDYSKYLDEQAAKEFIAWLMDT

SEQ ID NO: 402 - protein, 29 aa, Artificial Sequence
  Synthetic peptide
  MISC_FEATURE: c-term amidation
  MOD_RES (2)..(2): Aminoisobutyric acid
HXQGTFTSDYSKYLDERRAQDFVQWLMDT

SEQ ID NO: 403 - protein, 29 aa, Artificial Sequence
  Synthetic peptide
  MISC_FEATURE: c-term amidation
  MOD_RES (2)..(2): Aminoisobutyric acid
HXQGTFTSDYSKYLDERRAKDFVQWLMDT

SEQ ID NO: 404 - protein, 29 aa, Artificial Sequence
  Synthetic peptide
  MISC_FEATURE: c-term amidation
  MOD_RES (2)..(2): Aminoisobutyric acid
  MISC_FEATURE (16)..(20): Lactam ring between side chains at positions 16 and 20
HXQGTFTSDYSKYLDERRAKDFVQWLMDT

SEQ ID NO: 405 - protein, 29 aa, Artificial Sequence
  Synthetic peptide
  MISC_FEATURE: c-term amidation
  MOD_RES (2)..(2): aminoisobutyric acid
  MISC_FEATURE (12)..(16): Lactam ring between side chains at positions 12 and 16
HXQGTFTSDYSKYLDERRAQDFVQWLMDT

SEQ ID NO: 406 - protein, 29 aa, Artificial Sequence
  Synthetic peptide
  MISC_FEATURE: c-term amidation
  MOD_RES (2)..(2): Aminoisobutyric acid
  MISC_FEATURE (12)..(16): Lactam ring between side chains at positions 12 and 16
HXQGTFTSDYSKYLDERRAKDFVQWLMDT

SEQ ID NO: 407 - protein, 29 aa, Artificial Sequence
  Synthetic peptide
  MISC_FEATURE: c-term amidation
  MOD_RES (2)..(2): Aminoisobutyric acid
  MISC_FEATURE (16)..(20): Lactam ring between side chains at positions 16 and 20
HXQGTFTSDYSKYLDKRRAEDFVQWLMDT

SEQ ID NO: 408 - protein, 29 aa, Artificial Sequence
  Synthetic peptide
  MOD_RES (2)..(2): Aminoisobutyric acid
  MISC_FEATURE (2)..(2): c-term amidation
HXQGTFTSDYSKYLDERAAKDFVQWLMDT

SEQ ID NO: 409 - protein, 29 aa, Artificial Sequence
  Synthetic peptide
  MISC_FEATURE: c-term amidation
  MOD_RES (2)..(2): Aminoisobutyric acid
  MISC_FEATURE (16)..(20): Lactam ring between side chains at positions 16 and 20
HXQGTFTSDYSKYLDERAAKDFVQWLMDT

SEQ ID NO: 410 - protein, 29 aa, Artificial Sequence
  Synthetic peptide
  MISC_FEATURE: c-term amidation
  MOD_RES (2)..(2): Aminoisobutyric acid
  MISC_FEATURE (12)..(16): Lactam ring between side chains at positions 12 and 16
HXQGTFTSDYSKYLDERAAQDFVQWLMDT

SEQ ID NO: 411 - protein, 29 aa, Artificial Sequence
  Synthetic peptide
  MISC_FEATURE: c-term amidation
  MOD_RES (2)..(2): Aminoisobutyric acid
  MISC_FEATURE (12)..(16): Lactam ring between side chains at positions 12 and 16
HXQGTFTSDYSKYLDERAAKDFVQWLMDT

SEQ ID NO: 412 - protein, 29 aa, Artificial Sequence
  Synthetic peptide
  MISC_FEATURE: c-term amidation
  MOD_RES (2)..(2): Aminoisobutyric acid
  MISC_FEATURE (12)..(16): Lactam ring between side chains at positions 16 and 20
HXQGTFTSDYSKYLDKRAAEDFVQWLMDT

SEQ ID NO: 413 - protein, 29 aa, Artificial Sequence
  Synthetic peptide
  MISC_FEATURE: c-term amidation
  MOD_RES (2)..(2): Aminoisobutyric acid
HXQGTFTSDYSKYLDEQAAKEFIAWLMDT

SEQ ID NO: 414 - protein, 29 aa, Artificial Sequence
  Synthetic peptide
  MISC_FEATURE: c-term amidation
  MOD_RES (2)..(2): Aminoisobutyric acid
  MISC_FEATURE (12)..(16): Lactam ring between side chains at positions 12 and 16
HXQGTFTSDYSKYLDEQAAKEFIAWLMDT

SEQ ID NO: 415 - protein, 29 aa, Artificial Sequence
  Synthetic peptide
  MISC_FEATURE: c-term amidation
  MOD_RES (2)..(2): Aminoisobutyric acid
  MISC_FEATURE (16)..(20): Lactam ring between side chains at positions 16 and 20
HXQGTFTSDYSKYLDEQAAKEFIAWLMDT

SEQ ID NO: 416 - protein, 29 aa, Artificial Sequence
  Synthetic peptide
  MISC_FEATURE: c-term amidation
  MOD_RES (2)..(2): D-Ala
HXQGTFTSDYSKYLDERRAQDFVQWLMDT

SEQ ID NO: 417 - protein, 29 aa, Artificial Sequence
  Synthetic peptide
  MISC_FEATURE: c-term amidation
  MOD_RES (2)..(2): D-Ala
HXQGTFTSDYSKYLDERRAKDFVQWLMDT

SEQ ID NO: 418 - protein, 29 aa, Artificial Sequence
  Synthetic peptide
  MISC_FEATURE: c-term amidation
  MOD_RES (2)..(2): D-Ala
  MISC_FEATURE (16)..(20): Lactam ring between side chains at positions 16 and 20
HXQGTFTSDYSKYLDERRAKDFVQWLMDT

SEQ ID NO: 419 - protein, 29 aa, Artificial Sequence
  Synthetic peptide
  MISC_FEATURE: c-term amidation
  MOD_RES (2)..(2): D-Ala
  MISC_FEATURE (12)..(16): Lactam ring between side chains at positions 12 and 16
HXQGTFTSDYSKYLDERRAQDFVQWLMDT

SEQ ID NO: 420 - protein, 29 aa, Artificial Sequence
  Synthetic peptide
  MISC_FEATURE: c-term amidation
  MOD_RES (2)..(2): D-Ala
  MISC_FEATURE (12)..(16): Lactam ring between side chains at positions 12 and 16
HXQGTFTSDYSKYLDERRAKDFVQWLMDT

SEQ ID NO: 421 - protein, 29 aa, Artificial Sequence
  Synthetic peptide
  MISC_FEATURE: c-term amidation
  MOD_RES (2)..(2): D-Ala
  MISC_FEATURE (16)..(20): Lactam ring between side chains at positions 16 and 20
HXQGTFTSDYSKYLDKRRAEDFVQWLMDT

SEQ ID NO: 422 - protein, 29 aa, Artificial Sequence
  Synthetic peptide
  MISC_FEATURE: c-term amidation
  MOD_RES (2)..(2): D-Ala
HXQGTFTSDYSKYLDERAAKDFVQWLMDT

SEQ ID NO: 423 - protein, 29 aa, Artificial Sequence
  Synthetic peptide
  MISC_FEATURE: c-term amidation
  MOD_RES (2)..(2): D-Ala
  MISC_FEATURE (16)..(20): Lactam ring between side chains at positions 16 and 20
HXQGTFTSDYSKYLDERAAKDFVQWLMDT

SEQ ID NO: 424 - protein, 29 aa, Artificial Sequence
  Synthetic peptide
  MISC_FEATURE: c-term amidation
  MOD_RES (2)..(2): D-Ala
  MISC_FEATURE (12)..(16): Lactam ring between side chains at positions 12 and 16
HXQGTFTSDYSKYLDERAAQDFVQWLMDT

SEQ ID NO: 425 - protein, 29 aa, Artificial Sequence
  Synthetic peptide
  MISC_FEATURE: c-term amidation
  MOD_RES (2)..(2): D-Ala
  MISC_FEATURE (12)..(16): Lactam ring between side chains at positions 12 and 16
HXQGTFTSDYSKYLDERAAKDFVQWLMDT

SEQ ID NO: 426 - protein, 29 aa, Artificial Sequence
  Synthetic peptide
  MISC_FEATURE: c-term amidation
  MOD_RES (2)..(2): D-Ala
  MISC_FEATURE (16)..(20): Lactam ring between side chains at positions 16 and 20
HXQGTFTSDYSKYLDKRAAEDFVQWLMDT

SEQ ID NO: 427 - protein, 29 aa, Artificial Sequence
  Synthetic peptide
  MISC_FEATURE: c-term amidation
  MOD_RES (2)..(2): D-Ala
HXQGTFTSDYSKYLDEQAAKEFIAWLMDT

SEQ ID NO: 428 - protein, 29 aa, Artificial Sequence
  Synthetic peptide
  MISC_FEATURE: c-term amidation
  MOD_RES (2)..(2): D-Ala
  MISC_FEATURE (12)..(16): Lactam ring between side chains at positions 12 and 16
HXQGTFTSDYSKYLDEQAAKEFIAWLMDT

SEQ ID NO: 429 - protein, 29 aa, Artificial Sequence
  Synthetic peptide
  MISC_FEATURE: c-term amidation
  MOD_RES (2)..(2): D-Ala
  MISC_FEATURE (16)..(20): Lactam ring between side chains at positions 16 and 20
HXQGTFTSDYSKYLDEQAAKEFIAWLMDT

SEQ ID NO: 430 - protein, 29 aa, Artificial Sequence
  Synthetic peptide
  MISC_FEATURE: c-term amidation
HSEGTFTSDYSKYLDERRAQDFVQWLMDT

SEQ ID NO: 431 - protein, 29 aa, Artificial Sequence
  Synthetic peptide
  MISC_FEATURE: c-term amidation
HSEGTFTSDYSKYLDERRAKDFVQWLMDT

SEQ ID NO: 432 - protein, 29 aa, Artificial Sequence
  Synthetic peptide
  MISC_FEATURE: c-term amidation
  MISC_FEATURE (16)..(20): Lactam ring between side chains at positions 16 and 20
HSEGTFTSDYSKYLDERRAKDFVQWLMDT

SEQ ID NO: 433 - protein, 29 aa, Artificial Sequence
  Synthetic peptide
  MISC_FEATURE: c-term amidation
  MISC_FEATURE (16)..(16): Lactam ring between side chains at positions 12 and 16
HSEGTFTSDYSKYLDERRAQDFVQWLMDT

SEQ ID NO: 434 - protein, 29 aa, Artificial Sequence
  Synthetic peptide
  MISC_FEATURE: c-term amidation
  MISC_FEATURE (12)..(16): Lactam ring between side chains at positions 12 and 16
HSEGTFTSDYSKYLDERRAKDFVQWLMDT

SEQ ID NO: 435 - protein, 29 aa, Artificial Sequence
  Synthetic peptide
  MISC_FEATURE: c-term amidation
  MISC_FEATURE (16)..(20): Lactam ring between side chains at positions 16 and 20
HSEGTFTSDYSKYLDKRRAEDFVQWLMDT

SEQ ID NO: 436 - protein, 29 aa, Artificial Sequence
  Synthetic peptide
  MISC_FEATURE: c-term amidation
HSEGTFTSDYSKYLDERAAKDFVQWLMDT

SEQ ID NO: 437 - protein, 29 aa, Artificial Sequence
  Synthetic peptide
  MISC_FEATURE: c-term amidation
  MISC_FEATURE: Lactam ring between side chains at positions 16 and 20
HSEGTFTSDYSKYLDERAAKDFVQWLMDT

SEQ ID NO: 438 - protein, 29 aa, Artificial Sequence
  Synthetic peptide
  MISC_FEATURE: c-term amidation
  MISC_FEATURE (12)..(16): Lactam ring between side chains at positions 12 and 16
HSEGTFTSDYSKYLDERAAQDFVQWLMDT

SEQ ID NO: 439 - protein, 29 aa, Artificial Sequence
  Synthetic peptide
  MISC_FEATURE: c-term amidation
  MISC_FEATURE (12)..(16): Lactam ring between side chains at positions 12 and 16
HSEGTFTSDYSKYLDERAAKDFVQWLMDT

SEQ ID NO: 440 - protein, 29 aa, Artificial Sequence
  Synthetic peptide
  MISC_FEATURE: c-term amidation
  MISC_FEATURE (16)..(20): Lactam ring between side chains at positions 16 and 20
HSEGTFTSDYSKYLDKRAAEDFVQWLMDT

SEQ ID NO: 441 - protein, 29 aa, Artificial Sequence
  Synthetic peptide
  MISC_FEATURE: c-term amidation
HSEGTFTSDYSKYLDEQAAKEFIAWLMDT

SEQ ID NO: 442 - protein, 29 aa, Artificial Sequence
  Synthetic peptide
  MISC_FEATURE: c-term amidation
  MISC_FEATURE (12)..(16): Lactam ring between side chains at positions 12 and 16
HSEGTFTSDYSKYLDEQAAKEFIAWLMDT

SEQ ID NO: 443 - protein, 29 aa, Artificial Sequence
  Synthetic peptide
  MISC_FEATURE: c-term amidation
  MISC_FEATURE (16)..(20): Lactam ring between side chains at positions 16 and 20
HSEGTFTSDYSKYLDEQAAKEFIAWLMDT

SEQ ID NO: 444 - protein, 29 aa, Artificial Sequence
  Synthetic peptide
  MISC_FEATURE: c-term amidation
  MOD_RES (1)..(1): (Des-amino)His
XSEGTFTSDYSKYLDERRAQDFVQWLMDT

SEQ ID NO: 445 - protein, 29 aa, Artificial Sequence
  Synthetic peptide
  MISC_FEATURE: c-term amidation
  MOD_RES (1)..(1): (Des-amino)His
XSEGTFTSDYSKYLDERRAKDFVQWLMDT

SEQ ID NO: 446 - protein, 29 aa, Artificial Sequence
  Synthetic peptide
  MISC_FEATURE: c-term amidation
  MOD_RES (1)..(1): (Des-amino)His
  MISC_FEATURE (16)..(20): Lactam ring between side chains at positions 16 and 20
XSEGTFTSDYSKYLDERRAKDFVQWLMDT

SEQ ID NO: 447 - protein, 29 aa, Artificial Sequence
  Synthetic peptide
  MISC_FEATURE: c-term amidation
  MISC_FEATURE: Lactam ring between side chains at positions 12 and 16
  MOD_RES (1)..(1): (Des-amino)His
XSEGTFTSDYSKYLDERRAQDFVQWLMDT

SEQ ID NO: 448 - protein, 29 aa, Artificial Sequence
  Synthetic peptide
  MISC_FEATURE: c-term amidation
  MOD_RES (1)..(1): (Des-amino)His
  MISC_FEATURE (12)..(16): Lactam ring between side chains at positions 12 and 16
XSEGTFTSDYSKYLDERRAKDFVQWLMDT

SEQ ID NO: 449 - protein, 29 aa, Artificial Sequence
  Synthetic peptide
  MISC_FEATURE: c-term amidation
  MOD_RES (1)..(1): (Des-amino)His
  MISC_FEATURE (16)..(20): Lactam ring between side chains at positions 16 and 20
XSEGTFTSDYSKYLDKRRAEDFVQWLMDT

SEQ ID NO: 450 - protein, 29 aa, Artificial Sequence
  Synthetic peptide
  MISC_FEATURE: c-term amidation
  MOD_RES (1)..(1): (Des-amino)His
XSEGTFTSDYSKYLDERAAKDFVQWLMDT

SEQ ID NO: 451 - protein, 29 aa, Artificial Sequence
  Synthetic peptide
  MISC_FEATURE: c-term amidation
  MOD_RES (1)..(1): (Des-amino)His
  MISC_FEATURE (16)..(20): Lactam ring between side chains at positions 16 and 20
XSEGTFTSDYSKYLDERAAKDFVQWLMDT

SEQ ID NO: 452 - protein, 29 aa, Artificial Sequence
  Synthetic peptide
  MISC_FEATURE: C-term amidation
  MOD_RES (1)..(1): (Des-amino)His
  MISC_FEATURE (12)..(16): Lactam ring between side chains at positions 12 and 16
XSEGTFTSDYSKYLDERAAQDFVQWLMDT

SEQ ID NO: 453 - protein, 29 aa, Artificial Sequence
  Synthetic peptide
  MISC_FEATURE: c-term amidation
  MOD_RES (1)..(1): (Des-amino)His
  MISC_FEATURE (12)..(16): Lactam ring between side chains at positions 12 and 16
XSEGTFTSDYSKYLDERAAKDFVQWLMDT

SEQ ID NO: 454 - protein, 29 aa, Artificial Sequence
  Synthetic peptide
  MISC_FEATURE: c-term amidation
  MOD_RES (1)..(1): (Des-amino)His
  MISC_FEATURE (16)..(20): Lactam ring between side chains at positions 16 and 20
XSEGTFTSDYSKYLDKRAAEDFVQWLMDT

SEQ ID NO: 455 - protein, 29 aa, Artificial Sequence
  Synthetic peptide
  MISC_FEATURE: c-term amidation
  MOD_RES (1)..(1): (Des-amino)His
XSEGTFTSDYSKYLDEQAAKEFIAWLMDT

SEQ ID NO: 456 - protein, 29 aa, Artificial Sequence
  Synthetic peptide
  MISC_FEATURE: c-term amidation
  MOD_RES (1)..(1): (Des-amino)His
  MISC_FEATURE (12)..(16): Lactam ring between side chains at positions 12 and 16
XSEGTFTSDYSKYLDEQAAKEFIAWLMDT

SEQ ID NO: 457 - protein, 29 aa, Artificial Sequence
  Synthetic peptide
  MISC_FEATURE: c-term amidation
  MOD_RES (1)..(1): (Des-amino)His
  MISC_FEATURE (16)..(20): Lactam ring between side chains at positions 16 and 20
XSEGTFTSDYSKYLDEQAAKEFIAWLMDT

SEQ ID NO: 458 - protein, 29 aa, Artificial Sequence
  Synthetic peptide
  MISC_FEATURE: c-term amidation
  MOD_RES (2)..(2): Aminoisobutyric acid
HXEGTFTSDYSKYLDERRAQDFVQWLMDT

SEQ ID NO: 459 - protein, 29 aa, Artificial Sequence
  Synthetic peptide
  MISC_FEATURE: c-term amidation
  MOD_RES (2)..(2): Aminoisobutyric acid
HXEGTFTSDYSKYLDERRAKDFVQWLMDT

SEQ ID NO: 460 - protein, 29 aa, Artificial Sequence
  Synthetic peptide
  MISC_FEATURE: c-term amidation
  MOD_RES (2)..(2): Aminoisobutyric acid
  MISC_FEATURE (16)..(20): Lactam ring between side chains at positions 16 and 20
HXEGTFTSDYSKYLDERRAKDFVQWLMDT

SEQ ID NO: 461 - protein, 29 aa, Artificial Sequence
  Synthetic peptide
  MISC_FEATURE: c-term amidation
  MOD_RES (2)..(2): Aminoisobutyric acid
  MISC_FEATURE (12)..(16): Lactam ring between side chains at positions 12 and 16
HXEGTFTSDYSKYLDERRAQDFVQWLMDT

SEQ ID NO: 462 - protein, 29 aa, Artificial Sequence
  Synthetic peptide
  MISC_FEATURE: c-term amidation
  MOD_RES (2)..(2): Aminoisobutyric acid
  MISC_FEATURE (12)..(16): Lactam ring between side chains at positions 12 and 16
HXEGTFTSDYSKYLDERRAKDFVQWLMDT

SEQ ID NO: 463 - protein, 29 aa, Artificial Sequence
  Synthetic peptide
  MISC_FEATURE: c-term amidation
  MOD_RES (2)..(2): Aminoisobutyric acid
  MISC_FEATURE (16)..(20): Lactam ring between side chains at positions 16 and 20
HXEGTFTSDYSKYLDKRRAEDFVQWLMDT

SEQ ID NO: 464 - protein, 29 aa, Artificial Sequence
  Synthetic peptide
  MISC_FEATURE: c-term amidation
  MOD_RES (2)..(2): Aminoisobutyric acid
HXEGTFTSDYSKYLDERAAKDFVQWLMDT

SEQ ID NO: 465 - protein, 29 aa, Artificial Sequence
  Synthetic peptide
  MISC_FEATURE: c-term amidation
  MOD_RES (2)..(2): Aminoisobutyric acid
  MISC_FEATURE (16)..(20): Lactam ring between side chains at positions 16 and 20
HXEGTFTSDYSKYLDERAAKDFVQWLMDT

SEQ ID NO: 466 - protein, 29 aa, Artificial Sequence
  Synthetic peptide
  MISC_FEATURE: c-term amidation
  MOD_RES (2)..(2): Aminoisobutyric acid
  MISC_FEATURE (12)..(16): Lactam ring between side chains at postions 12 and 16
HXEGTFTSDYSKYLDERAAQDFVQWLMDT

SEQ ID NO: 467 - protein, 29 aa, Artificial Sequence
  Synthetic peptide
  MISC_FEATURE: c-term amidation
  MOD_RES (2)..(2): Aminoisobutyric acid
  MISC_FEATURE (12)..(16): Lactam ring between side chains at positions 12 and 16
HXEGTFTSDYSKYLDERAAKDFVQWLMDT

SEQ ID NO: 468 - protein, 29 aa, Artificial Sequence
  Synthetic peptide
  MISC_FEATURE: c-term amidation
  MOD_RES (2)..(2): Aminoisobutyric acid
  MISC_FEATURE (12)..(16): Lactam ring between side chains at positions 16 and 20
HXEGTFTSDYSKYLDKRAAEDFVQWLMDT

SEQ ID NO: 469 - protein, 29 aa, Artificial Sequence
  Synthetic peptide
  MISC_FEATURE: c-term amidation
  MOD_RES (2)..(2): Aminoisobutyric acid
HXEGTFTSDYSKYLDEQAAKEFIAWLMDT

SEQ ID NO: 470 - protein, 29 aa, Artificial Sequence
  Synthetic peptide
  MISC_FEATURE: c-term amidation
  MOD_RES (2)..(2): Aminoisobutyric acid
  MISC_FEATURE (12)..(16): Lactam ring between side chains at positions 12 and 16
HXEGTFTSDYSKYLDEQAAKEFIAWLMDT

SEQ ID NO: 471 - protein, 29 aa, Artificial Sequence
  Synthetic peptide
  MISC_FEATURE: c-term amidation
  MOD_RES (2)..(2): Aminoisobutyric acid
  MISC_FEATURE (16)..(20): Lactam ring between side chains at positions 16 and 20
HXEGTFTSDYSKYLDEQAAKEFIAWLMDT

SEQ ID NO: 472 - protein, 29 aa, Artificial Sequence
  Synthetic peptide
  MISC_FEATURE: c-term amidation
  MOD_RES (2)..(2): D-Ala
HXEGTFTSDYSKYLDERRAQDFVQWLMDT

SEQ ID NO: 473 - protein, 29 aa, Artificial Sequence
  Synthetic peptide
  MISC_FEATURE: c-term amidation
  MOD_RES (2)..(2): D-Ala
HXEGTFTSDYSKYLDERRAKDFVQWLMDT

SEQ ID NO: 474 - protein, 29 aa, Artificial Sequence
  Synthetic peptide
  MISC_FEATURE: c-term amidation
  MOD_RES (2)..(2): D-Ala
  MISC_FEATURE (16)..(20): Lactam ring between side chains at positions 16 and 20
HXEGTFTSDYSKYLDERRAKDFVQWLMDT

SEQ ID NO: 475 - protein, 29 aa, Artificial Sequence
  Synthetic peptide
  MISC_FEATURE: c-term amidation
  MOD_RES (2)..(2): D-Ala
  MISC_FEATURE (12)..(16): Lactam ring between side chains at positions 12 and 16
HXEGTFTSDYSKYLDERRAQDFVQWLMDT

SEQ ID NO: 476 - protein, 29 aa, Artificial Sequence
  Synthetic peptide
  MISC_FEATURE: c-term amidation
  MOD_RES (2)..(2): D-Ala
  MISC_FEATURE (12)..(16): Lactam ring between side chains at positions 12 and 16
HXEGTFTSDYSKYLDERRAKDFVQWLMDT

SEQ ID NO: 477 - protein, 29 aa, Artificial Sequence
  Synthetic peptide
  MISC_FEATURE: c-term amidation
  MOD_RES (2)..(2): D-Ala
  MISC_FEATURE (16)..(20): Lactam ring between side chains at positions 16 and 20
HXEGTFTSDYSKYLDKRRAEDFVQWLMDT

SEQ ID NO: 478 - protein, 29 aa, Artificial Sequence
  Synthetic peptide
  MISC_FEATURE: c-term amidation
  MOD_RES (2)..(2): D-Ala
HXEGTFTSDYSKYLDERAAKDFVQWLMDT

SEQ ID NO: 479 - protein, 29 aa, Artificial Sequence
  Synthetic peptide
  MISC_FEATURE: c-term amidation
  MOD_RES (2)..(2): D-Ala
  MISC_FEATURE (16)..(20): Lactam ring between side chains at positions 16 and 20
HXEGTFTSDYSKYLDERAAKDFVQWLMDT

SEQ ID NO: 480 - protein, 29 aa, Artificial Sequence
  Synthetic peptide
  MISC_FEATURE: c-term amidation
  MOD_RES (2)..(2): D-Ala
  MISC_FEATURE (12)..(16): Lactam ring between side chains at positions 12 and 16
HXEGTFTSDYSKYLDERAAQDFVQWLMDT

SEQ ID NO: 481 - protein, 29 aa, Artificial Sequence
  Synthetic peptide
  MISC_FEATURE: c-term amidation
  MOD_RES (2)..(2): D-Ala
  MISC_FEATURE (12)..(16): Lactam ring between side chains at positions 12 and 16
HXEGTFTSDYSKYLDERAAKDFVQWLMDT

SEQ ID NO: 482 - protein, 29 aa, Artificial Sequence
  Synthetic peptide
  MISC_FEATURE: c-term amidation
  MOD_RES (2)..(2): D-Ala
  MISC_FEATURE (16)..(20): Lactam ring between side chains at positions 16 and 20
HXEGTFTSDYSKYLDKRAAEDFVQWLMDT

SEQ ID NO: 483 - protein, 29 aa, Artificial Sequence
  Synthetic peptide
  MISC_FEATURE: c-term amidation
  MOD_RES (2)..(2): D-Ala
HXEGTFTSDYSKYLDEQAAKEFIAWLMDT

SEQ ID NO: 484 - protein, 29 aa, Artificial Sequence
  Synthetic peptide
  MISC_FEATURE: c-term amidation
  MOD_RES (2)..(2): D-Ala
  MISC_FEATURE (12)..(16): Lactam ring between side chains at positions 12 and 16
HXEGTFTSDYSKYLDEQAAKEFIAWLMDT

SEQ ID NO: 485 - protein, 29 aa, Artificial Sequence
  Synthetic peptide
  MISC_FEATURE: c-term amidation
  MOD_RES (2)..(2): D-Ala
  MISC_FEATURE (16)..(20): Lactam ring between side chains at positions 16 and 20
HXEGTFTSDYSKYLDEQAAKEFIAWLMDT

SEQ ID NO: 486 - protein, 29 aa, Artificial Sequence
  Synthetic peptide
  MISC_FEATURE: c-term amidation
  MOD_RES (2)..(2): Aminoisobutyric acid
  MOD_RES (24)..(24): Cys-PEG
HXQGTFTSDYSKYLDEQAAKEFICWLMNT

SEQ ID NO: 487 - protein, 29 aa, Artificial Sequence
  Synthetic peptide
  MISC_FEATURE: c-term amidation
  MOD_RES (2)..(2): Aminoisobutyric acid
  MOD_RES (29)..(29): Cys-PEG
HXQGTFTSDYSKYLDEQAAKEFIAWLMNC

SEQ ID NO: 488 - protein, 40 aa, Artificial Sequence
  Synthetic peptide
  MISC_FEATURE: c-term amidation
  MOD_RES (2)..(2): Aminoisobutyric acid
  MOD_RES (40)..(40): Cys-PEG
HXQGTFTSDYSKYLDEQAAKEFIAWLMNGGPSSGAPPPSC

SEQ ID NO: 489 - protein, 40 aa, Artificial Sequence; identical to SEQ ID NO: 488
  Synthetic peptide
  MISC_FEATURE: c-term amidation
  MOD_RES (2)..(2): Aminoisobutyric acid
  MISC_FEATURE (16)..(20): Lactam ring between side chains at positions 16 and 20
  MOD_RES (40)..(40): Cys-PEG

SEQ ID NO: 490 - protein, 39 aa, Artificial Sequence
  Synthetic peptide
  MISC_FEATURE: c-term amidation
  MOD_RES (2)..(2): Aminoisobutyric acid
  MOD_RES (24)..(24): Cys-PEG
HXQGTFTSDYSKYLDEQAAKEFICWLMNGGPSSGAPPPS

SEQ ID NO: 491 - protein, 39 aa, Artificial Sequence; identical to SEQ ID NO: 490
  Synthetic peptide
  MISC_FEATURE: c-term amidation
  MOD_RES (2)..(2): Aminoisobutyric acid
  MISC_FEATURE (16)..(20): Lactam ring between side chains at positions 16 and 20
  MOD_RES (24)..(24): Cys-PEG

SEQ ID NO: 492 - protein, 29 aa, Artificial Sequence
  Synthetic peptide
  MISC_FEATURE: c-term amidation
  MOD_RES (2)..(2): Aminoisobutyric acid
  MOD_RES (24)..(24): Cys-PEG
HXQGTFTSDYSKYLDERAAKDFVCWLMNT

SEQ ID NO: 493 - protein, 29 aa, Artificial Sequence
  Synthetic peptide
  MISC_FEATURE: c-term amidation
  MOD_RES (2)..(2): Aminoisobutyric acid
  MOD_RES (24)..(24): Cys-PEG
HXQGTFTSDYSKYLDERAAKDFVQWLMNC

SEQ ID NO: 494 - protein, 40 aa, Artificial Sequence
  Synthetic peptide
  MISC_FEATURE: c-term amidation
  MOD_RES (2)..(2): Aminoisobutyric acid
  MOD_RES (24)..(24): Cys-PEG
HXQGTFTSDYSKYLDERAAKDFVQWLMNGGPSSGAPPPSC

SEQ ID NO: 495 - protein, 40 aa, Artificial Sequence; identical to SEQ ID NO: 494
  Synthetic peptide
  MISC_FEATURE: c-term amidation
  MOD_RES (2)..(2): Aminoisobutyric acid
  MISC_FEATURE (16)..(20): Lactam ring between side chains at positions 16 and 20
  MOD_RES (40)..(40): Cys-PEG

SEQ ID NO: 496 - protein, 39 aa, Artificial Sequence
  Synthetic peptide
  MISC_FEATURE: c-term amidation
  MOD_RES (2)..(2): Aminoisobutyric acid
  MOD_RES (24)..(24): Cys-PEG
HXQGTFTSDYSKYLDERAAKDFVCWLMNGGPSSGAPPPS

SEQ ID NO: 497 - protein, 39 aa, Artificial Sequence; identical to SEQ ID NO: 496
  Synthetic peptide
  MISC_FEATURE: c-term amidation
  MOD_RES (2)..(2): Aminoisobutyric acid
  MISC_FEATURE (16)..(20): Lactam ring between side chains at positions 16 and 20
  MOD_RES (24)..(24): Cys-PEG

SEQ ID NO: 498 - protein, 30 aa, Artificial Sequence
  Synthetic peptide
  MISC_FEATURE: c-term amidation
  MOD_RES (2)..(2): Aminoisobutyric acid
  MOD_RES (24)..(24): Cys-PEG
HXQGTFTSDYSKYLDERRAKDFVCWLMNTA

SEQ ID NO: 499 - protein, 29 aa, Artificial Sequence
  Synthetic peptide
  MISC_FEATURE: c-term amidation
  MOD_RES (2)..(2): Aminoisobutyric acid
  MOD_RES (24)..(24): Cys-PEG
HXQGTFTSDYSKYLDERRAKDFVQWLMNC

SEQ ID NO: 500 - protein, 40 aa, Artificial Sequence
  Synthetic peptide
  MISC_FEATURE: c-term amidation
  MOD_RES (2)..(2): Aminoisobutyric acid
  MOD_RES (40)..(40): Cys-PEG
HXQGTFTSDYSKYLDERRAKDFVQWLMNGGPSSGAPPPSC

SEQ ID NO: 501 - protein, 40 aa, Artificial Sequence; identical to SEQ ID NO: 500
  Synthetic peptide
  MISC_FEATURE: c-term amidation
  MOD_RES (2)..(2): Aminoisobutyric acid
  MISC_FEATURE (16)..(20): Lactam ring between side chains at positions 16 and 20
  MOD_RES (40)..(40): Cys-PEG

SEQ ID NO: 502 - protein, 39 aa, Artificial Sequence
  Synthetic peptide
  MISC_FEATURE: c-term amidation
  MOD_RES (2)..(2): Aminoisobutyric acid
  MOD_RES (24)..(24): Cys-PEG
HXQGTFTSDYSKYLDERRAKDFVCWLMNGGPSSGAPPPS

SEQ ID NO: 503 - protein, 39 aa, Artificial Sequence; identical to SEQ ID NO: 502
  Synthetic peptide
  MISC_FEATURE: c-term amidation
  MOD_RES (2)..(2): Aminoisobutyric acid
  MISC_FEATURE (16)..(20): Lactam ring between side chains at positions 16 and 20
  MOD_RES (24)..(24): Cys-PEG

SEQ ID NO: 504 - protein, 29 aa, Artificial Sequence
  Synthetic peptide
  MISC_FEATURE: c-term amidation
  MOD_RES (2)..(2): Aminoisobutyric acid
  MISC_FEATURE (16)..(20): Lactam ring between side chains at positions 16 and 20
  MOD_RES (24)..(24): Cys-PEG
HXQGTFTSDYSKYLDEQAAKEFICWLMNT

SEQ ID NO: 505 - protein, 29 aa, Artificial Sequence
  Synthetic peptide
  MISC_FEATURE: c-term amidation
  MOD_RES (1)..(1): Alpha, Alpha-Dimethyl Imidiazole Acetic Acid
  MISC_FEATURE (16)..(20): Lactam ring between side chains at positions 16 and 20
  MOD_RES (24)..(24): Cys-PEG
XSQGTFTSDYSKYLDEQAAKEFICWLMNT

SEQ ID NO: 506 - protein, 29 aa, Artificial Sequence
  Synthetic peptide
  MISC_FEATURE: c-term amidation
  MOD_RES (1)..(1): Alpha, Alpha-Dimethly Imidiazole Acetic Acid
  MISC_FEATURE (16)..(20): Lactam ring between side chains at positions 16 and 20
  MOD_RES (29)..(29): Cys-PEG
XSQGTFTSDYSKYLDEQAAKEFIAWLMNC

SEQ ID NO: 507 - protein, 40 aa, Artificial Sequence
  Synthetic peptide
  MISC_FEATURE: c-term amidation
  MOD_RES (1)..(1): Alpha, Alpha Dimethyl Imidiazole Acetic Acid
  MISC_FEATURE (16)..(20): Lactam ring between side chains at positions 16 and 20
  MOD_RES (40)..(40): Cys-PEG
XSQGTFTSDYSKYLDEQAAKEFIAWLMNGGPSSGAPPPSC

SEQ ID NO: 508 - protein, 40 aa, Artificial Sequence
  Synthetic peptide
  MISC_FEATURE: c-term amidation
  MOD_RES (1)..(1): Alpha, Alpha Dimethyl Imidiazole Acetic Acid
  MISC_FEATURE (16)..(20): Lactam ring between side chains at positions 16 and 20
  MOD_RES (40)..(40): Cys-PEG
XSQGTFTSDYSKYLDERRAKDFVQWLMNGGPSSGAPPPSC

SEQ ID NO: 509 - protein, 39 aa, Artificial Sequence
  Synthetic peptide
  MISC_FEATURE: c-term amidation
  MOD_RES (1)..(1): Alpha, Alpha Dimethyl Imidiazole Acetic Acid
  MISC_FEATURE (16)..(20): Lactam ring between side chains at positions 16 and 20
  MOD_RES (24)..(24): Cys-PEG
XSQGTFTSDYSKYLDEQAAKEFICWLMNGGPSSGAPPPS

SEQ ID NO: 510 - protein, 29 aa, Artificial Sequence
  Synthetic peptide
  MISC_FEATURE: c-term amidation
  MOD_RES (1)..(1): Alpha, Alpha Dimethyl Imidiazole Acetic Acid
  misc_feature (2)..(2): Xaa can be any naturally occurring amino acid
  MISC_FEATURE (16)..(20): Lactam ring between side chains at positions 16 and 20
  MOD_RES (24)..(24): Cys-PEG
HXQGTFTSDYSKYLDERRAKDFVCWLMNT

SEQ ID NO: 511 - protein, 29 aa, Artificial Sequence
  Synthetic peptide
  MISC_FEATURE: c-term amidation
  MOD_RES (2)..(2): Alpha, Alpha Dimethyl Imidiazole Acetic Acid
  MISC_FEATURE (16)..(20): Lactam ring between side chains at positions 16 and 20
  MOD_RES (24)..(24): Cys-PEG
HXQGTFTSDYSKYLDERRAKDFVCWLMNT

SEQ ID NO: 512 - protein, 29 aa, Artificial Sequence
  Synthetic peptide
  MISC_FEATURE: c-term amidation
  MOD_RES (1)..(1): Alpha, Alpha Dimethyl Imidiazole Acetic Acid
  MISC_FEATURE (16)..(20): Lactam ring between side chains at positions 16 and 20
  MOD_RES (29)..(29): Cys-PEG
XSQGTFTSDYSKYLDERRAKDFVQWLMNC

SEQ ID NO: 513 - protein, 39 aa, Artificial Sequence
  Synthetic peptide
  MISC_FEATURE: c-term amidation
  MOD_RES (1)..(1): Alpha, Alpha Dimethyl Imidiazole Acetic Acid
  MISC_FEATURE (16)..(20): Lactam ring between side chains at positions 16 and 20
  MOD_RES (24)..(24): Cys-PEG
XSQGTFTSDYSKYLDERRAKDFVCWLMNGGPSSGAPPPS

SEQ ID NO: 514 - protein, 29 aa, Artificial Sequence
  Synthetic peptide
  MISC_FEATURE: c-term amidation
  MISC_FEATURE (16)..(20): Lactam ring between side chains at positions 16 and 20
  MOD_RES (24)..(24): Cys-PEG
HSQGTFTSDYSKYLDEQAAKEFICWLMNT

SEQ ID NO: 515 - protein, 11 aa, Artificial Sequence
  Synthetic peptide
GGPSSGAPPPS

SEQ ID NO: 516 - protein, 12 aa, Artificial Sequence
  Synthetic peptide
  MOD_RES (12)..(12): Cys-PEG
GGPSSGAPPPSC

SEQ ID NO: 517 - protein, 29 aa, Artificial Sequence
  Synthetic peptide
  MISC_FEATURE: c-term amidation
  MOD_RES (2)..(2): Aminoisobutyric acid
  MISC_FEATURE (16)..(20): Lactam ring between side chains at positions 16 and 20
  MOD_RES (24)..(24): Cys-PEG
HXQGTFTSDYSKYLDERRAKDFVCWLMNT

SEQ ID NO: 518 - protein, 29 aa, Artificial Sequence
  Synthetic peptide
  MISC_FEATURE: c-term amidation
  MOD_RES (24)..(24): Cys-PEG
HSQGTFTSDYSKYLDEQAAKEFICWLMNT

SEQ ID NO: 519 - protein, 29 aa, Artificial Sequence
  Synthetic peptide
  MISC_FEATURE: c-term amidation
  MOD_RES (1)..(1): Alpha, Alpha Dimethly Imidiazole Acetic Acid
  MOD_RES (24)..(24): Cys-PEG
XSQGTFTSDYSKYLDEQAAKEFICWLMNT

SEQ ID NO: 520 - protein, 29 aa, Artificial Sequence
  Synthetic peptide
  MISC_FEATURE: c-term amidation
  MOD_RES (1)..(1): Alpha, Alpha Dimethyl Imidiazole Acetic Acid
  MOD_RES (29)..(29): Cys-PEG
XSQGTFTSDYSKYLDEQAAKEFIAWLMNC

SEQ ID NO: 521 - protein, 39 aa, Artificial Sequence; identical to SEQ ID NO: 36
  Synthetic peptide
  MISC_FEATURE: c-term amidation

SEQ ID NO: 522 - protein, 39 aa, Artificial Sequence
  Synthetic peptide
  MISC_FEATURE: c-term amidation
HSQGTFTSDYSKYLDSRRAQDFVQWLMNGGPSSGAPPPS

SEQ ID NO: 523 - protein, 39 aa, Artificial Sequence
  Synthetic peptide
  MISC_FEATURE: c-term amidation
HSQGTFTSDYSKYLDSRRAQDFVQWLMKGGPSSGAPPPS

SEQ ID NO: 524 - protein, 39 aa, Artificial Sequence
  Synthetic peptide
  MISC_FEATURE: c-term amidation
HSQGTFTSDYSKYLDSRRAQDFVQWLVKGGPSSGAPPPS

SEQ ID NO: 525 - protein, 39 aa, Artificial Sequence
  Synthetic peptide
  MISC_FEATURE: c-term amidation
HSQGTFTSDYSKYLDSRRAQDFVQWLMDGGPSSGAPPPS

SEQ ID NO: 526 - protein, 39 aa, Artificial Sequence
  Synthetic peptide
  MISC_FEATURE: c-term amidation
HSQGTFTSDYSKYLDERRAKDFVQWLMDGGPSSGAPPPS

SEQ ID NO: 527 - protein, 30 aa, Artificial Sequence
  Synthetic peptide
  MISC_FEATURE: c-term amidation
HAEGTFTSDVSSYLEGQAAKEFIAWLVKGG

SEQ ID NO: 528 - protein, 29 aa, Artificial Sequence
  Synthetic peptide
  MISC_FEATURE: c-term amidation
  MOD_RES (2)..(2): Aminoisobutyric acid
  MISC_FEATURE (16)..(20): Lactam ring between side chains at positions 16 and 20
  MOD_RES (24)..(24): Cys-PEG
HXQGTFTSDYSKYLDERRAKDFVCWLMNT

SEQ ID NO: 529 - protein, 39 aa, Artificial Sequence; identical to SEQ ID NO: 513
  Synthetic peptide
  MISC_FEATURE: c-term amidation
  MOD_RES (1)..(1): Alpha, Alpha Dimethyl Imidiazole Acetic Acid
  MOD_RES (24)..(24): Cys-PEG

SEQ ID NO: 530 - protein, 29 aa, Artificial Sequence
  Synthetic peptide
  MISC_FEATURE: c-term amidation
  MOD_RES (1)..(1): Alpha, Alpha Dimethyl Imidiazole Acetic Acid
  MOD_RES (24)..(24): Cys-PEG
XSQGTFTSDYSKYLDERRAKDFVCWLMNT

SEQ ID NO: 531 - protein, 40 aa, Artificial Sequence
  Synthetic peptide
  MISC_FEATURE: c-term amidation
  MOD_RES (2)..(2): Aminoisobutyric acid
  MOD_RES (24)..(24): Cys-PEG
  MOD_RES (40)..(40): Cys-PEG
HXQGTFTSDYSKYLDERRAKEFICWLMNGGPSSGAPPPSC

SEQ ID NO: 532 - protein, 41 aa, Artificial Sequence
  Synthetic peptide
  MISC_FEATURE: c-term amidation
  MOD_RES (2)..(2): Aminoisobutyric acid
  MOD_RES (40)..(40): Cys-PEG
  MOD_RES (41)..(41): Cys-PEG
HXQGTFTSDYSKYLDEQAAKEFIAWLMNGGPSSGAPPPSCC

SEQ ID NO: 533 - protein, 39 aa, Artificial Sequence; identical to SEQ ID NO: 490
  Synthetic peptide
  MOD_RES (2)..(2): Aminoisobutyric acid
  MOD_RES (24)..(24): Cys-PEG
  MISC_FEATURE (24)..(24): c-term amidation

SEQ ID NO: 534 - protein, 29 aa, Artificial Sequence
  Synthetic peptide
  MISC_FEATURE: Chimera 2 AIB2 K10-C8 Cys 24-40K
  MISC_FEATURE: c-term amidation
  MOD_RES (2)..(2): Aminoisobutyric acid
  MOD_RES (10)..(10): Acylated with C8 fatty acid
  MOD_RES (24)..(24): Cys-PEG
HXQGTFTSDKSKYLDEQAAKEFICWLMNT

SEQ ID NO: 535 - protein, 29 aa, Artificial Sequence
  Synthetic peptide
  MISC_FEATURE: Chimera 2 AIB2 K10-C14 Cys 24-40K
  MISC_FEATURE: c-term amidation
  MOD_RES (2)..(2): Aminoisobutyric acid
  MOD_RES (10)..(10): Acylated with C14 fatty acid
  MOD_RES (24)..(24): Cys-PEG
HXQGTFTSDKSKYLDEQAAKEFICWLMNT

SEQ ID NO: 536 - protein, 29 aa, Artificial Sequence
  Synthetic peptide
  MISC_FEATURE: Chimera 2 AIB2 K10-C16 Cys24-40K
  MISC_FEATURE: c-term amidation
  MOD_RES (2)..(2): Aminoisobutyric acid
  MOD_RES (10)..(10): Acylated with C16 fatty acid
  MOD_RES (24)..(24): Cys-PEG
HXQGTFTSDKSKYLDEQAAKEFICWLMNT

SEQ ID NO: 537 - protein, 29 aa, Artificial Sequence
  Synthetic peptide
  MISC_FEATURE: Chimera 2 AIB2 K10-C18 Cys24-40K
  MISC_FEATURE: c-term amidation
  MOD_RES (2)..(2): Aminoisobutyric acid
  MOD_RES (10)..(10): Acylated with C18 fatty acid
  MOD_RES (24)..(24): Cys-PEG
HXQGTFTSDKSKYLDEQAAKEFICWLMNT

SEQ ID NO: 538 - protein, 29 aa, Artificial Sequence
  Synthetic peptide
  MISC_FEATURE: Chimera 2 K10-C18 Cys24-40K
  MISC_FEATURE: c-term amidation
  MOD_RES (10)..(10): Acylated with C18 fatty acid
  MOD_RES (24)..(24): Cys-PEG
HSQGTFTSDKSKYLDEQAAKEFICWLMNT

SEQ ID NO: 539 - protein, 29 aa, Artificial Sequence
  Synthetic peptide
  MISC_FEATURE: Glucagon E16 K20 K10-C18 Cys24-40K
  MOD_RES (10)..(10): Acylated with C18 fatty acid
  MOD_RES (24)..(24): Cys-PEG
HSQGTFTSDKSKYLDERRAKDFVCWLMNT

SEQ ID NO: 540 - protein, 29 aa, Artificial Sequence
  Synthetic peptide
  MISC_FEATURE: Glucagon E16 K20 K10-W-C18
  MISC_FEATURE: c-term amidation
  MOD_RES (10)..(10): Covalently bound to Trp residue comprising a C18 fatty acid
HSQGTFTSDKSKYLDERRAKDFVQWLMNT

SEQ ID NO: 541 - protein, 29 aa, Artificial Sequence
  Synthetic peptide
  MISC_FEATURE: Glucagon E16 K20 K10-W-C16 Cys24-40K
  MOD_RES (10)..(10): Covalently bound to Trp residue comprising a C16 fatty acid
  MOD_RES (24)..(24): Cys-PEG
HSQGTFTSDKSKYLDERRAKDFVCWLMNT

SEQ ID NO: 542 - protein, 29 aa, Artificial Sequence
  Synthetic peptide
  MISC_FEATURE: Glucagon E16 K20 K10-C16
  MISC_FEATURE: c-term amidation
  MOD_RES (10)..(10): Covalently bound to C16 fatty acid
HSQGTFTSDKSKYLDERRAKDFVQWLMNT

SEQ ID NO: 543 - protein, 29 aa, Artificial Sequence
  Synthetic peptide
  MISC_FEATURE: Glucagon E16 K20 K10-C16
  MISC_FEATURE: c-term amidation
  MOD_RES (10)..(10): Covalently bound to Trp residue comprising a C16 fatty acid
HSQGTFTSDKSKYLDERRAKDFVQWLMNT

SEQ ID NO: 544 - protein, 29 aa, Artificial Sequence
  Synthetic peptide
  MISC_FEATURE: Glucagon E16 K20 K10-C18
  MISC_FEATURE: c-term amidation
  MOD_RES (10)..(10): Covalently bound to C18 fatty acid
HSQGTFTSDKSKYLDERRAKDFVQWLMNT

SEQ ID NO: 545 - protein, 29 aa, Artificial Sequence
  Synthetic peptide
  MISC_FEATURE: Glucagon E16 K20
  MISC_FEATURE: c-term amidation
HSQGTFTSDYSKYLDERRAKDFVQWLMNT

SEQ ID NO: 546 - protein, 29 aa, Artificial Sequence
  Synthetic peptide
  MISC_FEATURE: Glucagon E16 K20 K10-W-C16 Cys 24-40K
  MISC_FEATURE: c-term amidation
  MOD_RES (10)..(10): Covalently bound to Trp residue comprising C16 fatty acid
  MOD_RES (24)..(24): Cys-PEG
HSQGTFTSDKSKYLDERRAKDFVCWLMNT

SEQ ID NO: 547 - protein, 29 aa, Artificial Sequence
  Synthetic peptide
  MISC_FEATURE: Glucagon E16 K20 K10-C18 Cys24-40K
  MISC_FEATURE: c-term amidation
  MOD_RES (10)..(10): Covalently bound to C18 fatty acid
  MOD_RES (24)..(24): Cys-PEG
HSQGTFTSDKSKYLDERRAKDFVCWLMNT

SEQ ID NO: 548 - protein, 29 aa, Artificial Sequence
  Synthetic peptide
  MISC_FEATURE: Glucagon E16 K20 K10-C18 Cys24-40K
  MISC_FEATURE: c-term amidation
  MOD_RES (10)..(10): Covalently bound to Trp residue comprising a C18 fatty acid
  MOD_RES (24)..(24): Cys-PEG
HSQGTFTSDKSKYLDERRAKDFVCWLMNT

SEQ ID NO: 549 - protein, 29 aa, Artificial Sequence
  Synthetic peptide
  MISC_FEATURE: Glucagon E16 K20 K10-C16 amide
  MISC_FEATURE: c-term amidation
  MOD_RES (10)..(10): Covalently bound to Glu residue comprising a C16 fatty acid
  MOD_RES (24)..(24): Cys-PEG
HSQGTFTSDKSKYLDERRAQDFVCWLMNT

SEQ ID NO: 550 - protein, 28 aa, Artificial Sequence
  Synthetic peptide
  MISC_FEATURE: Chimera 2 truncated by one amino acid
HSQGTFTSDYSKYLDEQAAKEFIAWLMN

SEQ ID NO: 551 - protein, 27 aa, Artificial Sequence
  Synthetic peptide
  MISC_FEATURE: Chimera 2 truncated by two amino acids
HSQGTFTSDYSKYLDEQAAKEFIAWLM

SEQ ID NO: 552 - protein, 28 aa, Artificial Sequence
  Synthetic peptide
  MISC_FEATURE: aa 1-28, E16 K20 C-terminal amide
  MISC_FEATURE: c-term amidation
HSQGTFTSDYSKYLDERRAKDFVQWLMN

SEQ ID NO: 553 - protein, 27 aa, Artificial Sequence
  Synthetic peptide
  MISC_FEATURE: aa 1-27 E16 K20 C-terminal amide
  MISC_FEATURE: c-term amidation
HSQGTFTSDYSKYLDERRAKDFVQWKM

SEQ ID NO: 554 - protein, 29 aa, Artificial Sequence
  Synthetic peptide
  MISC_FEATURE: c-term amidation
  MOD_RES (27)..(27): Norleucine
HSEGTFTSDYSKYLDEQAAKEFIAWLXNT

SEQ ID NO: 555 - protein, 39 aa, Artificial Sequence
  Synthetic peptide
  MISC_FEATURE (16)..(20): Lactam bridging side chains at positions 16 and 20
YSQGTFTSDYSKYLDEQAAKEFVNWLMNGGPSSGAPPPS

SEQ ID NO: 556 - protein, 29 aa, Artificial Sequence
  Synthetic peptide
  MISC_FEATURE: Chimera 2 with AIB at 16
  MISC_FEATURE: c-term amidation
  MOD_RES (16)..(16): Aminoisobutyric acid
HSQGTFTSDYSKYLDXQAAKEFIAWLMNT

SEQ ID NO: 557 - protein, 29 aa, Artificial Sequence
  Synthetic peptide
  MISC_FEATURE: c-term amidation
  MOD_RES (2)..(2): Aminoisobutyric acid
  MOD_RES (16)..(16): Aminoisobutyric acid
HXQGTFTSDYSKYLDXRRAQDFVQWLMNT

SEQ ID NO: 558 - protein, 29 aa, Artificial Sequence
  Synthetic peptide
  MISC_FEATURE: c-term amidation
  MOD_RES (2)..(2): Aminoisobutyric acid
  MISC_FEATURE (10)..(10): Covalently bound to Trp residue comprising a C16 fatty acid
  MOD_RES (16)..(16): Aminoisobutyric acid
  MOD_RES (24)..(24): Cys-PEG
HXQGTFTSDKSKYLDXRRAQDFVCWLMNT

SEQ ID NO: 559 - protein, 29 aa, Artificial Sequence
  Synthetic peptide
  MISC_FEATURE: c-term amidation
  MOD_RES (2)..(2): Aminoisobutric Acid
  MISC_FEATURE (10)..(10): Covalently bound to Trp residue comprising a C16 fatty acid
  MOD_RES (16)..(16): Aminoisobutric Acid
HXQGTFTSDKSKYLDXRRAQDFVCWLMNT

SEQ ID NO: 560 - protein, 29 aa, Artificial Sequence
  Synthetic peptide
  MISC_FEATURE: c-term amidation
  MOD_RES (2)..(2): Aminoisobutyric acid
  MISC_FEATURE (10)..(10): Covalently bound to Trp residue comprising a C16 fatty acid
  MOD_RES (16)..(16): Aminoisobutyric acid
  MOD_RES (20)..(20): Aminoisobutyric acid
  MOD_RES (24)..(24): Cys-PEG
HXQGTFTSDKSKYLDXRRAXDFVCWLMNT

SEQ ID NO: 561 - protein, 29 aa, Artificial Sequence
  Synthetic peptide
  MISC_FEATURE: c-term amidation
  MOD_RES (2)..(2): Aminoisobutyric acid
  MISC_FEATURE (10)..(10): Covalently bound to Trp residue comprising a C16 fatty acid
  MOD_RES (16)..(16): Aminoisobutyric acid
  MOD_RES (20)..(20): Aminoisobutyric acid
HXQGTFTSDKSKYLDXRRAXDFVCWLMNT

SEQ ID NO: 562 - protein, 29 aa, Artificial Sequence
  Synthetic peptide
  MISC_FEATURE: c-term amidation
  MOD_RES (2)..(2): Aminoisobutyric acid
  MOD_RES (16)..(16): Aminoisobutyric acid
HXQGTFTSDKSKYLDXRRAQDFVQWLMNT

SEQ ID NO: 563 - protein, 29 aa, Artificial Sequence
  Synthetic peptide
  MISC_FEATURE: c-term amidation
  MOD_RES (2)..(2): Aminoisobutyric Acid
  MOD_RES (10)..(10): Acylated with a C16 fatty acyl group
  MOD_RES (16)..(16): Aminoisobutyric Acid
HXQGTFTSDKSKYLDXRRAQDFVQWLMNT

SEQ ID NO: 564 - protein, 29 aa, Artificial Sequence
  Synthetic peptide
  MISC_FEATURE: c-term amidation
  MOD_RES (2)..(2): Aminoisobutyric Acid
  MOD_RES (10)..(10): Acylated with a C16 fatty acyl group via Ala-Ala spacer
  MOD_RES (16)..(16): Aminoisobutyric Acid
HXQGTFTSDKSKYLDXRRAQDFVQWLMNT

SEQ ID NO: 565 - protein, 29 aa, Artificial Sequence
  Synthetic peptide
  MISC_FEATURE: c-term amidation
  MOD_RES (2)..(2): Aminoisobutryic Acid
  MOD_RES (10)..(10): Acylated with a C16 fatty acyl group via gamma-Glu-gamma-Glu spacer
  MOD_RES (16)..(16): Aminoisobutryic Acid
HXQGTFTSDKSKYLDXRRAQDFVQWLMNT

SEQ ID NO: 566 - protein, 29 aa, Artificial Sequence
  Synthetic peptide
  MISC_FEATURE: c-term amidation
  MOD_RES (2)..(2): Aminoisobutryic Acid
  MOD_RES (10)..(10): Acylated with a C16 fatty acyl group via beta-Ala-beta-Ala spacer
  MOD_RES (16)..(16): Aminoisobutryic Acid
HXQGTFTSDKSKYLDXRRAQDFVQWLMNT

SEQ ID NO: 567 - protein, 29 aa, Artificial Sequence
  Synthetic peptide
  MISC_FEATURE: c-term amidation
  MOD_RES (2)..(2): Aminoisobutryic Acid
  MOD_RES (10)..(10): Acylated with a C16 fatty acyl group via 6-aminohexanoic acid spacer
  MOD_RES (16)..(16): Aminoisobutryic Acid
HXQGTFTSDKSKYLDXRRAQDFVQWLMNT

SEQ ID NO: 568 - protein, 29 aa, Artificial Sequence
  Synthetic peptide
  MISC_FEATURE: c-term amidation
  MOD_RES (2)..(2): Aminoisobutryic Acid
  MOD_RES (10)..(10): Acylated with a C16 fatty acyl group via Leu-Leu spacer
  MOD_RES (16)..(16): Aminoisobutryic Acid
HXQGTFTSDKSKYLDXRRAQDFVQWLMNT

SEQ ID NO: 569 - protein, 29 aa, Artificial Sequence
  Synthetic peptide
  MISC_FEATURE: c-term amidation
  MOD_RES (2)..(2): Aminoisobutryic Acid
  MOD_RES (10)..(10): Acylated with a C16 fatty acyl group via Pro-Pro spacer
  MOD_RES (16)..(16): Aminoisobutryic Acid
HXQGTFTSDKSKYLDXRRAQDFVQWLMNT

SEQ ID NO: 570 - protein, 29 aa, Artificial Sequence
  Synthetic peptide
  MISC_FEATURE: c-term amidation
  MOD_RES (2)..(2): Aminoisobutyric Acid
  MOD_RES (10)..(10): Acylated with a C14 fatty acyl group
  MOD_RES (16)..(16): Aminoisobutyric Acid
  MOD_RES (24)..(24): Pegylated
HXQGTFTSDKSKYLDXRRAQDFVCWLMNT

SEQ ID NO: 571 - protein, 29 aa, Artificial Sequence
  Synthetic peptide
  MISC_FEATURE: c-term amidation
  MOD_RES (2)..(2): Aminoisobutyric Acid
  MOD_RES (10)..(10): Acylated with a C14 fatty acyl group via gamma-Glu-gamma-Glu spacer
  MOD_RES (16)..(16): Aminoisobutyric Acid
  MOD_RES (24)..(24): Pegylated
HXQGTFTSDKSKYLDXRRAQDFVCWLMNT

SEQ ID NO: 572 - protein, 29 aa, Artificial Sequence
  Synthetic peptide
  MISC_FEATURE: c-term amidation
  MOD_RES (2)..(2): Aminoisobutryic Acid
  MOD_RES (10)..(10): Acylated with a C14 fatty acyl group via gamma-Glu-gamma-Glu spacer
  MOD_RES (16)..(16): Aminoisobutryic Acid
HXQGTFTSDKSKYLDXRRAQDFVQWLMNT

SEQ ID NO: 573 - protein, 29 aa, Artificial Sequence
  Synthetic peptide
  MISC_FEATURE: c-term amidation
  MOD_RES (2)..(2): Aminoisobutryic Acid
  MOD_RES (10)..(10): Acylated with a C14 fatty acyl group via Ala-Ala spacer
  MOD_RES (16)..(16): Aminoisobutryic Acid
  MOD_RES (24)..(24): Pegylated
HXQGTFTSDKSKYLDXRRAQDFVCWLMNT

SEQ ID NO: 574 - protein, 29 aa, Artificial Sequence
  Synthetic peptide
  MISC_FEATURE: c-term amidation
  MOD_RES (2)..(2): Aminoisobutryic Acid
  MOD_RES (10)..(10): Acylated with a C14 fatty acyl group via Ala-Ala spacer
  MOD_RES (16)..(16): Aminoisobutryic Acid
HXQGTFTSDKSKYLDXRRAQDFVQWLMNT

SEQ ID NO: 575 - protein, 29 aa, Artificial Sequence
  Synthetic peptide
  MISC_FEATURE: c-term amidation
  MOD_RES (2)..(2): Aminoisobutryic acid
  MOD_RES (10)..(10): Acylated with a C16 fatty acyl group via Ala-Ala spacer
  MOD_RES (16)..(16): Aminoisobutryic acid
  MOD_RES (24)..(24): Pegylated
HXQGTFTSDKSKYLDXRRAQDFVCWLMNT

SEQ ID NO: 576 - protein, 29 aa, Artificial Sequence
  Synthetic peptide
  MISC_FEATURE: c-term amidation
  MOD_RES (2)..(2): Aminoisobutryic Acid
  MOD_RES (10)..(10): Acylated with a C16 fatty acyl group via gamma-Glu-gamma-Glu spacer
  MOD_RES (16)..(16): Aminoisobutryic Acid
  MOD_RES (24)..(24): Pegylated
HXQGTFTSDKSKYLDXRRAQDFVCWLMNT

SEQ ID NO: 577 - protein, 29 aa, Artificial Sequence
  Synthetic peptide
  MISC_FEATURE: c-term amidation
  MOD_RES (10)..(10): Acylated with a C16 fatty acyl group
HSQGTFTSDKSKYLDSRRAQDFVQWLMNT

SEQ ID NO: 578 - protein, 29 aa, Artificial Sequence
  Synthetic peptide
  MISC_FEATURE: c-term amidation
  MOD_RES (10)..(10): Acylated with a C16 fatty acyl group via gamma-Glu-gamma-Glu spacer
HSQGTFTSDKSKYLDSRRAQDFVQWLMNT

SEQ ID NO: 579 - protein, 29 aa, Artificial Sequence
  Synthetic peptide
  MISC_FEATURE: AA-C16 Glucagon Amide
  MISC_FEATURE: c-term amidation
  MOD_RES (10)..(10): Acylated with a C16 fatty acyl group via Ala-Ala spacer
HSQGTFTSDKSKYLDSRRAQDFVQWLMNT

SEQ ID NO: 580 - protein, 29 aa, Artificial Sequence
  Synthetic peptide
  MISC_FEATURE: Chimera 2, AIB2, Lys10, Cys24-PEG
  MISC_FEATURE: c-term amidation
  MOD_RES (2)..(2): Aminoisobutryic Acid
  MOD_RES (24)..(24): Pegylated
HXQGTFTSDKSKYLDEQAAKEFICWLMNT

SEQ ID NO: 581 - protein, 30 aa, Artificial Sequence
  Synthetic peptide
  MISC_FEATURE: Peptide dS2E16K20K30-C14 Gluc Amide
  MISC_FEATURE: c-term amidation
  MOD_RES (2)..(2): Xaa is d-Ser
  MOD_RES (30)..(30): Acylated with a C14 fatty acyl group
HXQGTFTSDYSKYLDERRAKDFVQWLMNTK

SEQ ID NO: 582 - protein, 29 aa, Artificial Sequence
  Synthetic peptide
  MISC_FEATURE: Peptide dS2K10(C14)E16K20-Gluc Amide
  MISC_FEATURE: c-term amidation
  MOD_RES (2)..(2): Xaa is d-Ser
  MOD_RES (10)..(10): Acylated with a C14 fatty acyl group
HXQGTFTSDKSKYLDERRAKDFVQWLMNT

SEQ ID NO: 583 - protein, 30 aa, Artificial Sequence; identical to SEQ ID NO: 581
  Synthetic peptide
  MISC_FEATURE: Peptide dS2E16K20K30-C16 Gluc Amide
  MISC_FEATURE: c-term amidation
  MOD_RES (2)..(2): Xaa is d-Ser
  MOD_RES (30)..(30): Acylated with a C16 fatty acyl group

SEQ ID NO: 584 - protein, 29 aa, Artificial Sequence
  Synthetic peptide
  MISC_FEATURE: Peptide dS2K10(C16)E16K20-Gluc Amide
  MISC_FEATURE: c-term amidation
  MOD_RES (2)..(2): Xaa is d-Ser
  MOD_RES (10)..(10): Acylated with a C16 fatty acyl group
HXQGTFTSDKSKYLDERRAKDFVQWLMNT

SEQ ID NO: 585 - protein, 29 aa, Artificial Sequence
  Synthetic peptide
  MISC_FEATURE: Peptide Chimera 2-AIB2-K10-acylated
  MISC_FEATURE: c-term amidation
  MOD_RES (2)..(2): Aminoisobutryic Acid
  MOD_RES (10)..(10): Acylated with a C18 fatty acyl group
  MOD_RES (24)..(24): Pegylated
HXQGTFTSDKSKYLDEQAAKEFICWLMNT

SEQ ID NO: 586 - protein, 30 aa, Artificial Sequence
  Synthetic peptide
  MISC_FEATURE: Peptide Chimera 2-AIB2-K30-acylated
  MISC_FEATURE: c-term amidation
  MOD_RES (2)..(2): Aminoisobutryic Acid
  MOD_RES (24)..(24): Pegylated
  MOD_RES (30)..(30): Acylated with a C18 fatty acyl group
HXQGTFTSDYSKYLDEQAAKEFICWLMNTK

SEQ ID NO: 587 - protein, 29 aa, Artificial Sequence
  Synthetic peptide
  MISC_FEATURE: c-term amidation
  MOD_RES (1)..(1): DMIA
XSQGTFTSDYSKYLDERRAKDFVCWLMNT

SEQ ID NO: 588 - protein, 29 aa, Artificial Sequence
  Synthetic peptide
  MISC_FEATURE: c-term amidation
  MOD_RES (1)..(1): DMIA
  MOD_RES (16)..(20): Lactam ring between side chains of amino acids at positions 16 and 20
XSQGTFTSDYSKYLDERRAKDFVCWLMNT

SEQ ID NO: 589 - protein, 29 aa, Artificial Sequence
  Synthetic peptide
  MISC_FEATURE: c-term amidation
  MOD_RES (2)..(2): Aminoisobutryic Acid
HXEGTFTSDYSKYLDEQAAKEFICWLMNT

SEQ ID NO: 590 - protein, 29 aa, Artificial Sequence
  Synthetic peptide
  MISC_FEATURE: c-term amidation
  MOD_RES (2)..(2): Aminoisobutryic Acid
  MOD_RES (24)..(24): Pegylated
HXEGTFTSDYSKYLDEQAAKEFICWLMNT

SEQ ID NO: 591 - protein, 29 aa, Artificial Sequence
  Synthetic peptide
  MOD_RES (3)..(3): Xaa is a Glutamine analog
  MOD_RES (27)..(27): Xaa is Norleucine
HSXGTFTSDYSKYLDTRRAAEFVAWLXDE

SEQ ID NO: 592 - protein, 29 aa, Artificial Sequence
  Synthetic peptide
  MOD_RES (3)..(3): Xaa is a Glutamine analog
  MOD_RES (16)..(16): Xaa is Aib
HSXGTFTSDYSKYLDXRRAADFVAWLMDE

SEQ ID NO: 593 - protein, 29 aa, Artificial Sequence
  Synthetic peptide
  MOD_RES (27)..(27): Xaa is Norleucine
HSQGTFTSDYSKYLDTRRAAEFVAWLXDE

SEQ ID NO: 594 - protein, 29 aa, Artificial Sequence
  Synthetic peptide
  MOD_RES (3)..(3): Xaa is Acetamidomethyl-cysteine
  MOD_RES (27)..(27): Xaa is Norleucine
HSXGTFTSDYSKYLDTRRAAEFVAWLXDE

SEQ ID NO: 595 - protein, 29 aa, Artificial Sequence
  Synthetic peptide
  MOD_RES (3)..(3): Xaa is Acetyldiaminobutanoic acid
  MOD_RES (27)..(27): Xaa is Norleucine
HSXGTFTSDYSKYLDTRRAAEFVAWLXDE

SEQ ID NO: 596 - protein, 29 aa, Artificial Sequence
  Synthetic peptide
  MOD_RES (3)..(3): Xaa is carbamoyldiaminopropanoic acid
  MOD_RES (27)..(27): Xaa is Norleucine
HSXGTFTSDYSKYLDTRRAAEFVAWLXDE

SEQ ID NO: 597 - protein, 29 aa, Artificial Sequence
  Synthetic peptide
  MOD_RES (3)..(3): Xaa is Methylglutamine
  MOD_RES (27)..(27): Xaa is Norleucine
HSXGTFTSDYSKYLDTRRAAEFVAWLXDE

SEQ ID NO: 598 - protein, 29 aa, Artificial Sequence
  Synthetic peptide
  MOD_RES (3)..(3): Xaa is Methionine sulfoxide
  MOD_RES (27)..(27): Xaa is Norleucine
HSXGTFTSDYSKYLDTRRAAEFVAWLXDE

SEQ ID NO: 599 - protein, 29 aa, Artificial Sequence
  Synthetic peptide
  MOD_RES (3)..(3): Acetylornithine
  MOD_RES (27)..(27): Xaa is Norleucine
HSXGTFTSDYSKYLDTRRAAEFVAWLXDE

SEQ ID NO: 600 - protein, 29 aa, Artificial Sequence
  Synthetic peptide
  MOD_RES (16)..(16): Xaa is Aminoisobutryic Acid
HSQGTFTSDYSKYLDXRRAADFVAWLMDE

SEQ ID NO: 601 - protein, 29 aa, Artificial Sequence
  Synthetic peptide
  MOD_RES (3)..(3): Xaa is Acetyldiaminobutanoic acid
  MOD_RES (16)..(16): Xaa is Aminoisobutyric Acid
HSXGTFTSDYSKYLDXRRAADFVAWLMDE

SEQ ID NO: 602 - protein, 29 aa, Artificial Sequence
  Synthetic peptide
  MOD_RES (3)..(3): Xaa is Methylglutamine
  MOD_RES (16)..(16): Xaa is Aminoisobutyric Acid
HSXGTFTSDYSKYLDXRRAADFVAWLMDE

SEQ ID NO: 603 - protein, 29 aa, Artificial Sequence
  Synthetic peptide
  MOD_RES (3)..(3): Xaa is Acetyldiaminobutanoic acid
  MOD_RES (16)..(16): Xaa is Aminoisobutryic Acid
HSXGTFTSDYSKYLDXRRAADFVAWLLDE

SEQ ID NO: 604 - protein, 39 aa, Artificial Sequence
  Synthetic peptide
  MISC_FEATURE: c-term amidation
  MOD_RES (3)..(3): Xaa is Acetyldiaminobutanoic acid
  MOD_RES (16)..(16): Xaa is Aminoisobutyric Acid
HSXGTFTSDYSKYLDXRRAADFVAWLLDTGPSSGAPPPS

SEQ ID NO: 605 - protein, 29 aa, Artificial Sequence
  Synthetic peptide
  MOD_RES (3)..(3): Xaa is Acetyldiaminobutanoic acid
  MOD_RES (16)..(16): Xaa is Aminoisobutryic Acid
HSXGTFTSDYSKYLDXRRASDFVSWLLDE

SEQ ID NO: 606 - protein, 29 aa, Artificial Sequence
  Synthetic peptide
  MOD_RES (3)..(3): Xaa is Acetyldiaminobutanoic acid
  MOD_RES (16)..(16): Xaa is Aminoisobutryic Acid
HSXGTFTSDYSKYLDXRRATDFVTWLLDE

SEQ ID NO: 607 - protein, 29 aa, Artificial Sequence
  Synthetic peptide
  MISC_FEATURE: c-term amidation
  MOD_RES (1)..(1): Xaa is Dmia
  MOD_RES (10)..(10): Covalently bound to a C14 fatty acyl group
  MOD_RES (16)..(20): Lactam ring between side chains of amino acids at positions 16 and 20
XSQGTFTSDKSKYLDERRAKDFVQWLMNT

SEQ ID NO: 608 - protein, 29 aa, Artificial Sequence
  Synthetic peptide
  MISC_FEATURE: c-term amidation
  MOD_RES (1)..(1): DMIA
  MOD_RES (10)..(10): Covalently bound to C16 fatty acyl group
  MOD_RES (16)..(20): Lactam ring between side chains of amino acids at positions 16 and 20
XSQGTFTSDKSKYLDERRAKDFVQWLMNT

SEQ ID NO: 609 - protein, 29 aa, Artificial Sequence
  Synthetic peptide
  MISC_FEATURE: c-term amidation
  MOD_RES (1)..(1): DMIA
  MOD_RES (10)..(10): Covalently bound to C18 fatty acyl group
  MOD_RES (16)..(20): Lactam ring between side chains of amino acids at positions 16 and 20
XSQGTFTSDKSKYLDERRAKDFVQWLMNT

SEQ ID NO: 610 - protein, 29 aa, Artificial Sequence
  Synthetic peptide
  MISC_FEATURE: c-term amidation
  MOD_RES (2)..(2): Aminoisobutryic Acid
  MOD_RES (10)..(10): Covalently bound to C14 fatty acyl group
  MOD_RES (16)..(16): Aminoisobutryic Acid
HXQGTFTSDKSKYLDXRRAQDFVQWLMNT

SEQ ID NO: 611 - protein, 29 aa, Artificial Sequence
  Synthetic peptide
  MISC_FEATURE: c-term amidation
  MOD_RES (2)..(2): Aminoisobutryic Acid
  MOD_RES (10)..(10): Covalently bound to C16 fatty acyl group
  MOD_RES (16)..(16): Aminoisobutryic Acid
HXQGTFTSDKSKYLDXRRAQDFVQWLMNT

SEQ ID NO: 612 - protein, 29 aa, Artificial Sequence
  Synthetic peptide
  MISC_FEATURE: c-term amidation
  MOD_RES (2)..(2): Aminoisobutryic Acid
  MOD_RES (10)..(10): Covalently bound to C18 fatty acyl group
  MOD_RES (16)..(16): Aminoisobutryic Acid
HXQGTFTSDKSKYLDXRRAQDFVQWLMNT

SEQ ID NO: 613 - protein, 29 aa, Artificial Sequence
  Synthetic peptide
  MISC_FEATURE: c-term amidation
  MOD_RES (2)..(2): Xaa is d-Ser
  MOD_RES (10)..(10): Covalently bound to C14 fatty acyl group
HXQGTFTSDKSKYLDERRAKDFVQWLMNT

SEQ ID NO: 614 - protein, 29 aa, Artificial Sequence
  Synthetic peptide
  MISC_FEATURE: c-term amidation
  MOD_RES (2)..(2): Xaa is d-Ser
  MOD_RES (10)..(10): Covalently bound to C16 fatty acyl group
HXQGTFTSDKSKYLDERRAKDFVQWLMNT

SEQ ID NO: 615 - protein, 29 aa, Artificial Sequence
  Synthetic peptide
  MISC_FEATURE: c-term amidation
  MOD_RES (2)..(2): Xaa is d-Ser
  MOD_RES (10)..(10): Covalently bound to a C18 fatty acyl group
HXQGTFTSDKSKYLDERRAKDFVQWLMNT

SEQ ID NO: 616 - protein, 29 aa, Artificial Sequence
  Synthetic peptide
  MISC_FEATURE: c-term amidation
  MOD_RES (2)..(2): Aminoisobutyric Acid
  MOD_RES (10)..(10): Covalently bound to a C14 fatty acyl group
  MOD_RES (16)..(16): Aminoisobutyric Acid
HXQGTFTSDKSKYLDXRRAQDFVCWLMNT

SEQ ID NO: 617 - protein, 29 aa, Artificial Sequence
  Synthetic peptide
  MISC_FEATURE: c-term amidation
  MOD_RES (2)..(2): Aminoisobutryic Acid
  MOD_RES (10)..(10): Covalently bound to C14 fatty acyl group via gamma-Glu-gamma-Glu spacer
  MOD_RES (16)..(16): Aminoisobutryic Acid
HXQGTFTSDKSKYLDXRRAQDFVCWLMNT

SEQ ID NO: 618 - protein, 29 aa, Artificial Sequence
  Synthetic peptide
  MISC_FEATURE: c-term amidation
  MOD_RES (2)..(2): Aminoisobutryic Acid
  MOD_RES (10)..(10): Covalently bound to C14 fatty acyl group via Ala-Ala spacer
  MOD_RES (16)..(16): Aminoisobutryic Acid
HXQGTFTSDKSKYLDXRRAQDFVCWLMNT

SEQ ID NO: 619 - protein, 29 aa, Artificial Sequence
  Synthetic peptide
  MISC_FEATURE: c-term amidation
  MOD_RES (2)..(2): Aminoisobutyric Acid
  MOD_RES (10)..(10): Covalently bound to C16 fatty acyl group via di peptide spacer
  MOD_RES (16)..(16): Aminoisobutyric Acid
HXQGTFTSDKSKYLDXRRAQDFVCWLMNT

SEQ ID NO: 620 - protein, 29 aa, Artificial Sequence
  Synthetic peptide
  MISC_FEATURE: c-term amidation
  MOD_RES (2)..(2): Aminoisobutyric Acid
  MOD_RES (10)..(10): Covelently bound to C16 fatty acyl group via Ala-Ala spacer
  MOD_RES (16)..(16): Aminoisobutyric Acid
HXQGTFTSDKSKYLDXRRAQDFVCWLMNT

SEQ ID NO: 621 - protein, 29 aa, Artificial Sequence
  Synthetic peptide
  MISC_FEATURE: c-term amidation
  MOD_RES (2)..(2): Aminoisobutyric Acid
  MOD_RES (10)..(10): Covalently bound to C16 fatty acyl group
  MOD_RES (16)..(16): Aminoisobutyric Acid
HXQGTFTSDKSKYLDXRRAQDFVCWLMNT

SEQ ID NO: 622 - protein, 30 aa, Artificial Sequence
  Synthetic peptide
  MISC_FEATURE: c-term amidation
  MOD_RES (2)..(2): Aminoisobutyric Acid
  MOD_RES (10)..(10): Covalently bound to C16 fatty acyl group
  MOD_RES (16)..(16): Aminoisobutyric Acid
HXQGTFTSDKSKYLDXRRAQDFVCWLMNTK

SEQ ID NO: 623 - protein, 29 aa, Artificial Sequence
  Synthetic peptide
  MISC_FEATURE: beta-Ala-beta-Ala - C16 Glucagon Amide
  MISC_FEATURE: c-term amidation
  MISC_FEATURE (10)..(10): Acylated with a C16 fatty acyl group via beta-Ala-beta-Ala spacer
HSQGTFTSDKSKYLDSRRAQDFVQWLMNT

SEQ ID NO: 624 - protein, 29 aa, Artificial Sequence
  Synthetic peptide
  MISC_FEATURE: Chimera-2 Aib2C24Mal40KPEG
  MOD_RES (2)..(2): Xaa is Aib
  MOD_RES (24)..(24): Covalently bound to 40kDa PEG via thioether made by reaction of peptide with a maleimide-activated PEG
  MOD_RES (29)..(29): AMIDATION
HXQGTFTSDYSKYLDEQAAKEFICWLMNT

SEQ ID NO: 625 - protein, 29 aa, Artificial Sequence
  Synthetic peptide
  MISC_FEATURE: Chimera-2 Aib2E16K20lactamC24Mal40KPEG
  MOD_RES (2)..(2): Xaa is Aib
  MISC_FEATURE (16)..(20): Lactam ring between side chains of the amino acids at positions 16 and 20
  MOD_RES (24)..(24): Covalently bound to 40kDa PEG via thioether made by reaction of peptide with a maleimide-activated PEG
  MOD_RES (29)..(29): AMIDATION
HXQGTFTSDYSKYLDEQAAKEFICWLMNT

SEQ ID NO: 626 - protein, 29 aa, Artificial Sequence
  Synthetic peptide
  MISC_FEATURE: Glucagon Aib2E16K20lactamC24amideMal40KPEG
  MOD_RES (2)..(2): Xaa is Aib
  MISC_FEATURE (16)..(20): Lactam ring between side chains of amino acids at positions 16 and 20
  MOD_RES (24)..(24): Covalently bound to 40kDa PEG via thioether made by reaction of peptide with a maleimide-activated PEG
  MOD_RES (29)..(29): AMIDATION
HXQGTFTSDYSKYLDERRAKDFVCWLMNT

SEQ ID NO: 627 - skipped

SEQ ID NO: 628 - protein, 29 aa, Artificial Sequence
  Synthetic peptide
  MISC_FEATURE: Glucagon Dmia1E16K20lactamC24Mal40KPEG
  MOD_RES (1)..(1): Xaa is Dmia
  MISC_FEATURE (16)..(20): Lactam ring between side chains of amino acids at positions 16 and 20
  MOD_RES (24)..(24): Covalently bound to 40kDa PEG via thioether made by reaction of peptide with a maleimide-activated PEG
  MOD_RES (29)..(29): AMIDATION
XSQGTFTSDYSKYLDERRAKDFVCWLMNT

SEQ ID NO: 629 - protein, 29 aa, Artificial Sequence
  Synthetic peptide
  MISC_FEATURE: Glucagon Dmia1E16K20lactamC24Mal40KPEG
  MOD_RES (1)..(1): Xaa is Dmia
  MISC_FEATURE (16)..(20): Lactam ring between side chains of amino acids at positions 16 and 20
  MISC_FEATURE (24)..(24): Covalently bound to 40kDa PEG via thioether made by reaction of peptide with a maleimide-activated PEG
XSQGTFTSDYSKYLDERRAKDFVCWLMNT

SEQ ID NO: 630 - protein, 29 aa, Artificial Sequence
  Synthetic peptide
  MISC_FEATURE: Glucagon Dmia1E16K20lactamC24thioether40KPEG
  MOD_RES (1)..(1): Xaa is Dmia
  MISC_FEATURE (16)..(20): Lactam ring between side chains of amino acids at position 16 and 20
  MOD_RES (24)..(24): Covalently bound to 40kDa PEG via thioether made by reaction of peptide with haloacetyl-activated PEG
  MOD_RES (29)..(29): AMIDATION
XSQGTFTSDYSKYLDERRAKDFVCWLMNT

SEQ ID NO: 631 - protein, 29 aa, Artificial Sequence
  Synthetic peptide
  MISC_FEATURE: Chimera2 Aib2E3C24-Thioether40K PEG
  MOD_RES (2)..(2): Xaa is Aib
  MOD_RES (24)..(24): Covalently bound to 40kDa PEG via thioether made by reaction of peptide with haloacetyl-activated PEG
  MOD_RES (29)..(29): AMIDATION
HXEGTFTSDYSKYLDEQAAKEFICWLMNT

SEQ ID NO: 632 - protein, 29 aa, Artificial Sequence
  Synthetic peptide
  MOD_RES (1)..(1): Xaa is Dmia
  MOD_RES (24)..(24): Covalently bound to 40kDa PEG
  MOD_RES (29)..(29): AMIDATION
XSEGTFTSDYSKYLEERRAKDFVCWLMNT

SEQ ID NO: 633 - protein, 29 aa, Artificial Sequence
  Synthetic peptide
  MISC_FEATURE: Glucagon Aib2Aib16C24K10(rErE-C16) C24PEG40K amide
  MOD_RES (2)..(2): Xaa is Aib
  MOD_RES (10)..(10): Covalently bound to C14 fatty acyl group via gamma-Glu-gamma-Glu spacer
  MOD_RES (16)..(16): Xaa is Aib
  MOD_RES (24)..(24): Covalently bound to 40kDa PEG via thioether made by reaction of peptide with haloacetyl-activated PEG
  MOD_RES (29)..(29): AMIDATION
HXQGTFTSDKSKYLDXRRAQDFVCWLMNT

SEQ ID NO: 634 - protein, 29 aa, Artificial Sequence
  Synthetic peptide
  MISC_FEATURE: Glucagon Aib2Aib16K10(AA-C14)C24PEG40K TE amide
  MOD_RES (2)..(2): Xaa is Aib
  MOD_RES (10)..(10): Covalently bound to C14 fatty acyl group via Ala-Ala spacer
  MOD_RES (16)..(16): Xaa is Aib
  MOD_RES (24)..(24): Covalently bound to 40kDa PEG via thioether made by reaction of peptide with haloacetyl-activated PEG
  MOD_RES (29)..(29): AMIDATION
HXQGTFTSDKSKYLDXRRAQDFVCWLMNT

SEQ ID NO: 635 - protein, 29 aa, Artificial Sequence
  Synthetic peptide
  MISC_FEATURE: Glucagon Aib2Aib16K10(AA-C16) amide
  MOD_RES (2)..(2): Xaa is Aib
  MOD_RES (10)..(10): Covalently bound to C16 fatty acyl group via Ala-Ala spacer
  MOD_RES (16)..(16): Xaa is Aib
  MOD_RES (29)..(29): AMIDATION
HXQGTFTSDKSKYLDXRRAQDFVQWLMNT

SEQ ID NO: 636 - protein, 29 aa, Artificial Sequence
  Synthetic peptide
  MISC_FEATURE: Glucagon Aib2Aib16K10(rErE-C16) amide
  MOD_RES (2)..(2): Xaa is Aib
  MOD_RES (10)..(10): Covalently bound to C16 fatty acyl group via gamma-Glu-gamma-Glu spacer
  MOD_RES (16)..(16): Xaa is Aib
  MOD_RES (29)..(29): AMIDATION
HXQGTFTSDKSKYLDXRRAQDFVQWLMNT

SEQ ID NO: 637 - protein, 29 aa, Artificial Sequence
  Synthetic peptide
  MOD_RES (2)..(2): Xaa is Aib
  MOD_RES (16)..(16): Xaa is Aib
  MOD_RES (29)..(29): AMIDATION
HXQGTFTSDYSKYLDXRRAQDFVQWLMNT

SEQ ID NO: 638 - DNA, 20 bp, Artificial Sequence
  Synthetic primer
caaggtccagggaggttgtg

SEQ ID NO: 639 - DNA, 24 bp, Artificial Sequence
  Synthetic primer
ccaaaggtaagctgtccataagga

SEQ ID NO: 640 - DNA, 22 bp, Artificial Sequence
  Synthetic primer
ctctcccaagagtcacatgtcc

SEQ ID NO: 641 - DNA, 22 bp, Artificial Sequence
  Synthetic primer
caataactcggtcccctacaac

SEQ ID NO: 642 - protein, 29 aa, Artificial Sequence
  Synthetic peptide
HSQGTFTSDYSKYLDSRRAQDFVQWLMDT

SEQ ID NO: 643 - protein, 29 aa, Artificial Sequence
  Synthetic peptide
  MISC_FEATURE: c-term amidation
  MOD_RES (2)..(2): Xaa is d-Ser
  MOD_RES (10)..(10): Acylated with a C16 fatty acyl group via gamma-Glu spacer
HXQGTFTSDKSKYLDEQAAKEFIAWLMNT

SEQ ID NO: 644 - protein, 29 aa, Artificial Sequence
  Synthetic peptide
  MISC_FEATURE: c-term amidation
  MOD_RES (2)..(2): Xaa is d-Ser
  MOD_RES (10)..(10): Acylated with a C16 fatty acyl group via gamma-Glu-gamma-Glu spacer
HXQGTFTSDKSKYLDEQAAKEFIAWLMNT

SEQ ID NO: 645 - protein, 29 aa, Artificial Sequence
  Synthetic peptide
  MISC_FEATURE: c-term amidation
  MOD_RES (2)..(2): Xaa is Aib
  MOD_RES (10)..(10): Acylated with a C16 fatty acyl group via gamma-Glu spacer
HXQGTFTSDKSKYLDEQAAKEFIAWLMNT

SEQ ID NO: 646 - protein, 29 aa, Artificial Sequence
  Synthetic peptide
  MISC_FEATURE: c-term amidation
  MOD_RES (2)..(2): Xaa is Aib
  MOD_RES (10)..(10): Acylated with a C16 fatty acyl group via gamma-Glu-gamma-Glu spacer
HXQGTFTSDKSKYLDEQAAKEFIAWLMNT

SEQ ID NO: 647 - protein, 29 aa, Artificial Sequence
  Synthetic peptide
  MISC_FEATURE: c-term amidation
  MOD_RES (2)..(2): Xaa is Aib
  MOD_RES (10)..(10): Acylated with a C16 fatty acyl group
HXEGTFTSDKSKYLDEQAAKEFIAWLMNT

SEQ ID NO: 648 - protein, 29 aa, Artificial Sequence
  Synthetic peptide
  MISC_FEATURE: c-term amidation
  MOD_RES (2)..(2): Xaa is Aib
  MOD_RES (10)..(10): Acylated with a C16 fatty acyl group via gamma-Glu-gamma-Glu spacer
HXEGTFTSDKSKYLDEQAAKEFIAWLMNT

SEQ ID NO: 649 - protein, 29 aa, Artificial Sequence
  Synthetic peptide
  MISC_FEATURE: c-term amidation
  MOD_RES (2)..(2): Xaa is Aib
  MOD_RES (10)..(10): Acylated with a C16 fatty acyl group via gamma-Glu spacer
HXQGTFISDKSKYLDEQAAKEFIAWLMNT

SEQ ID NO: 650 - protein, 29 aa, Artificial Sequence
  Synthetic peptide
  MISC_FEATURE: c-term amidation
  MOD_RES (2)..(2): Xaa is Aib
  MOD_RES (10)..(10): Acylated with a C16 fatty acyl group via gamma-Glu-gamma-Glu spacer
HXQGTFISDKSKYLDEQAAKEFIAWLMNT

SEQ ID NO: 651 - protein, 29 aa, Artificial Sequence
  Synthetic peptide
  MISC_FEATURE: c-term amidation
  MOD_RES (1)..(1): Xaa is Dmia
  MOD_RES (10)..(10): Acylated with a C16 fatty acyl group via gamma-Glu spacer
  MISC_FEATURE (16)..(20): Lactam ring between side chains of amino acids at positions 16 and 20
XSQGTFTSDKSKYLDERRAKDFVQWLMNT

SEQ ID NO: 652 - protein, 29 aa, Artificial Sequence
  Synthetic peptide
  MISC_FEATURE: c-term amidation
  MOD_RES (1)..(1): Xaa is Dmia
  MOD_RES (10)..(10): Acylated with a C16 fatty acyl group via gamma-Glu-gamma-Glu spacer
  MISC_FEATURE (16)..(20): Lactam ring between side chains of amino acids at positions 16 and 20
XSQGTFTSDKSKYLDERRAKDFVQWLMNT

SEQ ID NO: 653 - protein, 29 aa, Artificial Sequence
  Synthetic peptide
  MISC_FEATURE: c-term amidation
  MOD_RES (1)..(1): Xaa is Dmia
  MISC_FEATURE (16)..(20): Lactam ring between side chains of amino acids at positions 16 and 20
  MOD_RES (29)..(29): Acylated with a C16 fatty acyl group via gamma-Glu spacer
XSQGTFTSDYSKYLDERRAKDFVQWLMNK

SEQ ID NO: 654 - protein, 29 aa, Artificial Sequence
  Synthetic peptide
  MISC_FEATURE: c-term amidation
  MOD_RES (1)..(1): Xaa is Dmia
  MISC_FEATURE (16)..(20): Lactam ring between side chains of amino acids at positions 16 and 20
  MOD_RES (29)..(29): Acylated with a C16 fatty acyl group via gamma-Glu-gamma-Glu spacer
XSQGTFTSDYSKYLDERRAKDFVQWLMNK

SEQ ID NO: 655 - protein, 29 aa, Artificial Sequence
  Synthetic peptide
  MISC_FEATURE: c-term amidation
  MOD_RES (2)..(2): Xaa is Aib
  MOD_RES (10)..(10): Acylated with a C16 fatty acyl group via gamma-Glu-gamma-Glu spacer
  MOD_RES (16)..(16): Xaa is Aib
HXQGTFTSDKSKYLDXRAAQDFVQWLMDT

SEQ ID NO: 656 - protein, 29 aa, Artificial Sequence
  Synthetic peptide
  MISC_FEATURE: c-term amidation
  MOD_RES (2)..(2): Xaa is Aib
  MOD_RES (10)..(10): Acylated with a C16 fatty acyl group via gamma-Glu spacer
  MOD_RES (16)..(16): Xaa is Aib
HXQGTFTSDKSKYLDXRAAQDFVQWLMDT

SEQ ID NO: 657 - protein, 29 aa, Artificial Sequence
  Synthetic peptide
  MISC_FEATURE: c-term amidation
  MOD_RES (2)..(2): Aminoisobutryic Acid
  MOD_RES (10)..(10): Acylated with a C16 fatty acyl group via dipeptide spacer
  MOD_RES (16)..(16): Aminoisobutryic Acid
HXQGTFTSDKSKYLDXRRAQDFVQWLMNT

SEQ ID NO: 658 - protein, 29 aa, Artificial Sequence
  Synthetic peptide
  MISC_FEATURE: c-term amidation
  MOD_RES (2)..(2): Aminoisobutyric Acid
  MOD_RES (10)..(10): Acylated with a C14 fatty acyl group via dipeptide spacer
  MOD_RES (16)..(16): Aminoisobutyric Acid
  MOD_RES (24)..(24): Pegylated
HXQGTFTSDKSKYLDXRRAQDFVCWLMNT

SEQ ID NO: 659 - protein, 29 aa, Artificial Sequence
  Synthetic peptide
  MISC_FEATURE: c-term amidation
  MOD_RES (2)..(2): Aminoisobutryic Acid
  MOD_RES (10)..(10): Acylated with a C14 fatty acyl group via dipeptide spacer
  MOD_RES (16)..(16): Aminoisobutryic Acid
HXQGTFTSDKSKYLDXRRAQDFVQWLMNT

SEQ ID NO: 660 - protein, 29 aa, Artificial Sequence
  Synthetic peptide
  MISC_FEATURE: c-term amidation
  MOD_RES (2)..(2): Aminoisobutryic Acid
  MOD_RES (10)..(10): Acylated with a C16 fatty acyl group via dipeptide spacer
  MOD_RES (16)..(16): Aminoisobutryic Acid
  MOD_RES (24)..(24): Pegylated
HXQGTFTSDKSKYLDXRRAQDFVCWLMNT

SEQ ID NO: 661 - protein, 29 aa, Artificial Sequence
  Synthetic peptide
  MISC_FEATURE: c-term amidation
  MOD_RES (10)..(10): Acylated with a C16 fatty acyl group via dipeptide spacer
HSQGTFTSDKSKYLDSRRAQDFVQWLMNT

SEQ ID NO: 662 - protein, 30 aa, Artificial Sequence; identical to SEQ ID NO: 581
  Synthetic peptide
  MISC_FEATURE: Peptide dS2E16K20K30-C14 Gluc Amide
  MISC_FEATURE: c-term amidation
  MOD_RES (2)..(2): D-serine, D-alanine, valine, amino n-butyric acid, glycine, N-methyl serine, aminoisobutyric acid
  MOD_RES (30)..(30): Acylated with a C14 fatty acyl group

SEQ ID NO: 663 - protein, 29 aa, Artificial Sequence
  Synthetic peptide
  MISC_FEATURE: Peptide dS2K10(C14)E16K20-Gluc Amide
  MISC_FEATURE: c-term amidation
  MOD_RES (2)..(2): D-serine, D-alanine, valine, amino n-butyric acid, glycine, N-methyl serine, aminoisobutyric acid
  MOD_RES (10)..(10): Acylated with a C14 fatty acyl group
HXQGTFTSDKSKYLDERRAKDFVQWLMNT

SEQ ID NO: 664 - protein, 30 aa, Artificial Sequence; identical to SEQ ID NO: 581
  Synthetic peptide
  MISC_FEATURE: Peptide dS2E16K20K30-C16 Gluc Amide
  MISC_FEATURE: c-term amidation
  MOD_RES (2)..(2): D-serine, D-alanine, valine, amino n-butyric acid, glycine, N-methyl serine, aminoisobutyric acid
  MOD_RES (30)..(30): Acylated with a C16 fatty acyl group

SEQ ID NO: 665 - protein, 29 aa, Artificial Sequence
  Synthetic peptide
  MISC_FEATURE: Peptide dS2K10(C16)E16K20-Gluc Amide
  MISC_FEATURE: c-term amidation
  MOD_RES (2)..(2): D-serine, D-alanine, valine, amino n-butyric acid, glycine, N-methyl serine, aminoisobutyric acid
  MOD_RES (10)..(10): Acylated with a C16 fatty acyl group
HXQGTFTSDKSKYLDERRAKDFVQWLMNT

SEQ ID NO: 666 - protein, 29 aa, Artificial Sequence
  Synthetic peptide
  MISC_FEATURE: c-term amidation
  MOD_RES (2)..(2): D-serine, D-alanine, valine, amino n-butyric acid, glycine, N-methyl serine, aminoisobutyric acid
  MOD_RES (10)..(10): Covalently bound to C14 fatty acyl group
HXQGTFTSDKSKYLDERRAKDFVQWLMNT

SEQ ID NO: 667 - protein, 29 aa, Artificial Sequence
  Synthetic peptide
  MISC_FEATURE: c-term amidation
  MOD_RES (2)..(2): D-serine, D-alanine, valine, amino n-butyric acid, glycine, N-methyl serine, aminoisobutyric acid
  MOD_RES (10)..(10): Covalently bound to C16 fatty acyl group
HXQGTFTSDKSKYLDERRAKDFVQWLMNT

SEQ ID NO: 668 - protein, 29 aa, Artificial Sequence
  Synthetic peptide
  MISC_FEATURE: c-term amidation
  MOD_RES (2)..(2): D-serine, D-alanine, valine, amino n-butyric acid, glycine, N-methyl serine, aminoisobutyric acid
  MOD_RES (10)..(10): Covalently bound to a C18 fatty acyl group
HXQGTFTSDKSKYLDERRAKDFVQWLMNT

SEQ ID NO: 669 - protein, 29 aa, Artificial Sequence
  Synthetic peptide
  MISC_FEATURE: c-term amidation
  MOD_RES (2)..(2): Aminoisobutryic Acid
  MOD_RES (10)..(10): Covalently bound to C14 fatty acyl group via dipeptide spacer
  MOD_RES (16)..(16): Aminoisobutryic Acid
HXQGTFTSDKSKYLDXRRAQDFVCWLMNT

SEQ ID NO: 670 - protein, 29 aa, Artificial Sequence
  Synthetic peptide
  MISC_FEATURE: Glucagon Aib2Aib16C24K10(rErE-C16) C24PEG40K amide
  MOD_RES (2)..(2): Xaa is Aib
  MOD_RES (10)..(10): Covalently bound to C14 fatty acyl group via dipeptide spacer
  MOD_RES (16)..(16): Xaa is Aib
  MOD_RES (24)..(24): Covalently bound to 40kDa PEG via thioether made by reaction of peptide with haloacetyl-activated PEG
  MOD_RES (29)..(29): AMIDATION
HXQGTFTSDKSKYLDXRRAQDFVCWLMNT

SEQ ID NO: 671 - protein, 29 aa, Artificial Sequence
  Synthetic peptide
  MISC_FEATURE: Glucagon Aib2Aib16K10(rErE-C16) amide
  MOD_RES (2)..(2): Xaa is Aib
  MOD_RES (10)..(10): Covalently bound to C16 fatty acyl group via dipeptide spacer
  MOD_RES (16)..(16): Xaa is Aib
  MOD_RES (29)..(29): AMIDATION
HXQGTFTSDKSKYLDXRRAQDFVQWLMNT

SEQ ID NO: 672 - protein, 29 aa, Artificial Sequence
  Synthetic peptide
  MISC_FEATURE: c-term amidation
  MOD_RES (2)..(2): D-serine, D-alanine, valine, amino n-butyric acid, glycine, N-methyl serine, aminoisobutyric acid
  MOD_RES (10)..(10): Acylated with a C16 fatty acyl group via acidic amino acid spacer
HXQGTFTSDKSKYLDEQAAKEFIAWLMNT

SEQ ID NO: 673 - protein, 29 aa, Artificial Sequence
  Synthetic peptide
  MISC_FEATURE: c-term amidation
  MOD_RES (2)..(2): D-serine, D-alanine, valine, amino n-butyric acid, glycine, N-methyl serine, aminoisobutyric acid
  MOD_RES (10)..(10): Acylated with a C16 fatty acyl group via dipeptide spacer
HXQGTFTSDKSKYLDEQAAKEFIAWLMNT

SEQ ID NO: 674 - protein, 29 aa, Artificial Sequence
  Synthetic peptide
  MISC_FEATURE: c-term amidation
  MOD_RES (2)..(2): Xaa is Aib
  MOD_RES (10)..(10): Acylated with a C16 fatty acyl group via acidic amino acid spacer
HXQGTFTSDKSKYLDEQAAKEFIAWLMNT

SEQ ID NO: 675 - protein, 29 aa, Artificial Sequence
  Synthetic peptide
  MISC_FEATURE: c-term amidation
  MOD_RES (2)..(2): Xaa is Aib
  MOD_RES (10)..(10): Acylated with a C16 fatty acyl group via dipeptide spacer
HXQGTFTSDKSKYLDEQAAKEFIAWLMNT

SEQ ID NO: 676 - protein, 29 aa, Artificial Sequence
  Synthetic peptide
  MISC_FEATURE: c-term amidation
  MOD_RES (2)..(2): Xaa is Aib
  MOD_RES (10)..(10): Acylated with a C16 fatty acyl group via dipeptide spacer
HXEGTFTSDKSKYLDEQAAKEFIAWLMNT

SEQ ID NO: 677 - protein, 29 aa, Artificial Sequence
  Synthetic peptide
  MISC_FEATURE: c-term amidation
  MOD_RES (2)..(2): Xaa is Aib
  MOD_RES (10)..(10): Acylated with a C16 fatty acyl group via acidic amino acid spacer
HXQGTFISDKSKYLDEQAAKEFIAWLMNT

SEQ ID NO: 678 - protein, 29 aa, Artificial Sequence
  Synthetic peptide
  MISC_FEATURE: c-term amidation
  MOD_RES (2)..(2): Xaa is Aib
  MOD_RES (10)..(10): Acylated with a C16 fatty acyl group via dipeptide spacer
HXQGTFISDKSKYLDEQAAKEFIAWLMNT

SEQ ID NO: 679 - protein, 29 aa, Artificial Sequence
  Synthetic peptide
  MISC_FEATURE: c-term amidation
  MOD_RES (1)..(1): Xaa is Dmia
  MOD_RES (10)..(10): Acylated with a C16 fatty acyl group via acidic amino acid spacer
  MISC_FEATURE (16)..(20): Lactam ring between side chains of amino acids at positions 16 and 20
XSQGTFTSDKSKYLDERRAKDFVQWLMNT

SEQ ID NO: 680 - protein, 29 aa, Artificial Sequence
  Synthetic peptide
  MISC_FEATURE: c-term amidation
  MOD_RES (1)..(1): Xaa is Dmia
  MOD_RES (10)..(10): Acylated with a C16 fatty acyl group via dipeptide spacer
  MISC_FEATURE (16)..(20): Lactam ring between side chains of amino acids at positions 16 and 20
XSQGTFTSDKSKYLDERRAKDFVQWLMNT

SEQ ID NO: 681 - protein, 29 aa, Artificial Sequence
  Synthetic peptide
  MISC_FEATURE: c-term amidation
  MOD_RES (1)..(1): Xaa is Dmia
  MISC_FEATURE (16)..(20): Lactam ring between side chains of amino acids at positions 16 and 20
  MOD_RES (29)..(29): Acylated with a C16 fatty acyl group via acidic amino acid spacer
XSQGTFTSDYSKYLDERRAKDFVQWLMNK

SEQ ID NO: 682 - protein, 29 aa, Artificial Sequence
  Synthetic peptide
  MISC_FEATURE: c-term amidation
  MOD_RES (1)..(1): Xaa is Dmia
  MISC_FEATURE (16)..(20): Lactam ring between side chains of amino acids at positions 16 and 20
  MOD_RES (29)..(29): Acylated with a C16 fatty acyl group via dipeptide spacer
XSQGTFTSDYSKYLDERRAKDFVQWLMNK

SEQ ID NO: 683 - protein, 29 aa, Artificial Sequence
  Synthetic peptide
  MISC_FEATURE: c-term amidation
  MOD_RES (2)..(2): Xaa is Aib
  MOD_RES (10)..(10): Acylated with a C16 fatty acyl group via dipeptide spacer
  MOD_RES (16)..(16): Xaa is Aib
HXQGTFTSDKSKYLDXRAAQDFVQWLMDT

SEQ ID NO: 684 - protein, 29 aa, Artificial Sequence
  Synthetic peptide
  MISC_FEATURE: c-term amidation
  MOD_RES (2)..(2): Xaa is Aib
  MOD_RES (10)..(10): Acylated with a C16 fatty acyl group via acidic amino acid spacer
  MOD_RES (16)..(16): Xaa is Aib
HXQGTFTSDKSKYLDXRAAQDFVQWLMDT

SEQ ID NO: 685 - protein, 29 aa, Artificial Sequence
  Synthetic peptide
  MOD_RES (2)..(2): Xaa is AIB
  misc_feature (16)..(16): Xaa can be any naturally occurring amino acid
  misc_feature (20)..(20): Xaa can be any naturally occurring amino acid
  MOD_RES (29)..(29): C-terminal amidation
HSQGTFTSDYSKYLDXQAAXGFIAWLMNT

SEQ ID NO: 686 - protein, 29 aa, Artificial Sequence
  Synthetic peptide
  MOD_RES (2)..(2): Xaa is AIB
  MOD_RES (10)..(10): Acylated with C16 fatty acyl group
  MOD_RES (16)..(16): Xaa is AIB
  MOD_RES (29)..(29): C-terminal amidation
HXQGTFTSDKSKYLDXRAAQDFVQWLMDT

SEQ ID NO: 687 - protein, 29 aa, Artificial Sequence
  Synthetic peptide
  MOD_RES (2)..(2): Xaa is AIB
  MOD_RES (10)..(10): Acylated with C14 fatty acyl group via dipeptide spacer
  MOD_RES (16)..(16): Xaa is AIB
  MOD_RES (29)..(29): C-terminal amidation
HXQGTFTSDKSKYLDXRAAQDFVQWLMDT

SEQ ID NO: 688 - protein, 29 aa, Artificial Sequence
  Synthetic peptide
  MOD_RES (2)..(2): Xaa is AIB
  MOD_RES (10)..(10): Acylated with C18 fatty acyl group via dipeptide spacer
  MOD_RES (16)..(16): Xaa is AIB
  MOD_RES (29)..(29): C-terminal amidation
HXQGTFTSDKSKYLDXRAAQDFVQWLMDT

SEQ ID NO: 689 - protein, 29 aa, Artificial Sequence
  Synthetic peptide
  MOD_RES (2)..(2): Xaa is AIB
  MOD_RES (10)..(10): Acylated with C16 fatty acyl group via dipeptide spacer
  MOD_RES (16)..(16): Xaa is AIB
  MOD_RES (29)..(29): C-terminal amidation
HXEGTFTSDKSKYLDXRAAQDFVQWLMDT

SEQ ID NO: 690 - protein, 29 aa, Artificial Sequence
  Synthetic peptide
  MOD_RES (2)..(2): Xaa is AIB
  MOD_RES (10)..(10): Acylated with C16 fatty acyl group via dipeptide spacer
  MOD_RES (16)..(16): Xaa is AIB
HXQGTFISDKSKYLDXRAAQDFVQWLMDT

SEQ ID NO: 691 - protein, 29 aa, Artificial Sequence
  Synthetic peptide
  MOD_RES (2)..(2): Xaa is AIB
  MOD_RES (10)..(10): Acylated with C16 fatty acyl group via dipeptide spacer
  MOD_RES (29)..(29): C-terminal amidation
HXQGTFTSDKSKYLDERAAQDFVQWLMDT

SEQ ID NO: 692 - protein, 29 aa, Artificial Sequence
  Synthetic peptide
  MOD_RES (2)..(2): Xaa is AIB
  MOD_RES (10)..(10): Acylated with C16 fatty acyl group via dipeptide spacer
  MOD_RES (16)..(16): Xaa is AIB
  MOD_RES (29)..(29): C-terminal amidation
HXQGTFTSDKSKYLEXRAAQDFVQWLMDT

SEQ ID NO: 693 - protein, 29 aa, Artificial Sequence
  Synthetic peptide
  MOD_RES (2)..(2): d-Ser
  MOD_RES (10)..(10): Acylated with C16 fatty acyl group via dipeptide spacer
  MOD_RES (16)..(16): Xaa is AIB
  MOD_RES (29)..(29): C-terminal amidation
HSQGTFTSDKSKYLDXRAAQDFVQWLMDT

SEQ ID NO: 694 - protein, 29 aa, Artificial Sequence
  Synthetic peptide
  MOD_RES (2)..(2): Xaa is AIB
  MOD_RES (10)..(10): Acylated with C16 fatty acyl group via dipeptide spacer
  MOD_RES (16)..(16): Xaa is AIB
  MOD_RES (29)..(29): C-terminal amidation
HXQGTFTSDKSKYLDXRAAQDFVQWLLDT

SEQ ID NO: 695 - protein, 29 aa, Artificial Sequence
  Synthetic peptide
  MOD_RES (2)..(2): Xaa is AIB
  MOD_RES (10)..(10): Acylated with C16 fatty acyl group via dipeptide spacer
  MOD_RES (29)..(29): C-terminal amidation
HXQGTFTSDKSKYLDEQAAKEFIAWLLDT

SEQ ID NO: 696 - protein, 29 aa, Artificial Sequence
  Synthetic peptide
  MOD_RES (2)..(2): Xaa is AIB
  MOD_RES (10)..(10): Acylated with C16 fatty acyl group via gamma-Glu spacer
  MOD_RES (29)..(29): C-terminal amidation
HXQGTFTSDKSKYLDEQAAKEFICWLLDT

SEQ ID NO: 697 - protein, 29 aa, Artificial Sequence
  Synthetic peptide
  MOD_RES (2)..(2): Xaa is AIB
  MOD_RES (10)..(10): Acylated with C16 fatty acyl group via gamma-Glu spacer
  MOD_RES (24)..(24): PEGYLATION
  MOD_RES (29)..(29): C-terminal amidation
HXQGTFTSDKSKYLDEQAAKEFICWLLDT

SEQ ID NO: 698 - protein, 29 aa, Artificial Sequence
  Synthetic peptide
  MOD_RES (2)..(2): Xaa is AIB
  MOD_RES (10)..(10): Acylated with C16 fatty acyl group via gamma-Glu spacer
  MOD_RES (24)..(24): PEGYLATION
  MOD_RES (29)..(29): C-terminal amidation
HXQGTFTSDKSKYLDERAAQDFVCWLLDT

SEQ ID NO: 699 - protein, 30 aa, Artificial Sequence
  Synthetic peptide
  MOD_RES (2)..(2): Xaa is AIB
  MOD_RES (10)..(10): Acylated with C16 fatty acyl group via gamma-Glu spacer
  MOD_RES (30)..(30): PEGYLATION
  MOD_RES (30)..(30): C-terminal amidation
HXQGTFTSDKSKYLDEQAAKEFIQWLLDTC

SEQ ID NO: 700 - protein, 29 aa, Artificial Sequence
  Synthetic peptide
  MOD_RES (10)..(10): Acylated with C16 fatty acyl group via gamma-Glu spacer
  MOD_RES (24)..(24): PEGYLATION
  MOD_RES (29)..(29): C-terminal amidation
HAQGTFTSDKSKYLDERAAQDFVCWLLDT

SEQ ID NO: 701 - protein, 29 aa, Artificial Sequence
  Synthetic peptide
  MOD_RES (2)..(2): d-Ser
  MOD_RES (10)..(10): Acylated with C16 fatty acyl group via gamma-Glu spacer
  MOD_RES (29)..(29): C-terminal amidation
HSQGTFTSDKSKYLDEQAAKEFICWLLDT

SEQ ID NO: 702 - protein, 29 aa, Artificial Sequence
  Synthetic peptide
  MOD_RES (2)..(2): d-Ser
  MOD_RES (10)..(10): Acylated with C16 fatty acyl group via gamma-Glu spacer
  MOD_RES (29)..(29): C-terminal amidation
HSQGTFTSDKSKYLDERAAQDFVQWLLDT

SEQ ID NO: 703 - protein, 29 aa, Artificial Sequence
  Synthetic peptide
  MOD_RES (2)..(2): d-Ser
  MOD_RES (10)..(10): Acylated with C16 fatty acyl group via gamma-Glu spacer
  MOD_RES (29)..(29): C-terminal amidation
HSQGTFTSDKSKYLDERAAQDFVCWLLDT

SEQ ID NO: 704 - protein, 29 aa, Artificial Sequence
  Synthetic peptide
  MOD_RES (2)..(2): d-Ser
  MOD_RES (10)..(10): Acylated with C16 fatty acyl group via gamma-Glu spacer
HSQGTFTSDKSKYLDEQAAKEFICWLLDT

SEQ ID NO: 705 - protein, 31 aa, Artificial Sequence
  Synthetic peptide
  MOD_RES (2)..(2): d-Ser
  MOD_RES (10)..(10): Acylated with C16 fatty acyl group via gamma-Glu spacer
  MOD_RES (31)..(31): C-terminal amidation
HSQGTFTSDKSKYLDEQAAKEFICWLLDTGE

SEQ ID NO: 706 - protein, 31 aa, Artificial Sequence
  Synthetic peptide
  MOD_RES (2)..(2): d-Ser
  MOD_RES (10)..(10): Acylated with C16 fatty acyl group via gamma-Glu spacer
  MOD_RES (24)..(24): PEGYLATION
HSQGTFTSDKSKYLDEQAAKEFICWLLDTGG

SEQ ID NO: 707 - protein, 29 aa, Artificial Sequence
  Synthetic peptide
  MOD_RES (2)..(2): d-Ser
  MOD_RES (10)..(10): Acylated with C16 fatty acyl group via gamma-Glu spacer
  MOD_RES (24)..(24): PEGYLATION
  MOD_RES (29)..(29): C-terminal amidation
HSQGTFTSDKSKYLDERAAQDFVCWLLDT

SEQ ID NO: 708 - protein, 30 aa, Artificial Sequence
  Synthetic peptide
  MOD_RES (2)..(2): d-Ser
  MOD_RES (10)..(10): Acylated with C16 fatty acyl group via gamma-Glu spacer
  MOD_RES (30)..(30): PEGYLATION
  MOD_RES (30)..(30): C-terminal amidation
HSQGTFTSDKSKYLDERAAQDFVQWLLDTC

SEQ ID NO: 709 - protein, 30 aa, Artificial Sequence
  Synthetic peptide
  MOD_RES (2)..(2): d-Ser
  MOD_RES (10)..(10): Acylated with C16 fatty acyl group via gamma-Glu spacer
  MOD_RES (24)..(24): PEGYLATION
  MOD_RES (30)..(30): C-terminal amidation
HSQGTFTSDYSKYLDSRRAQDFVQWLMNTE

SEQ ID NO: 710 - protein, 30 aa, Artificial Sequence
  Synthetic peptide
  MOD_RES (2)..(2): d-Ser
  MOD_RES (10)..(10): Acylated with C16 fatty acyl group via gamma-Glu spacer
  MOD_RES (24)..(24): PEGYLATION
HSQGTFTSDKSKYLDEQAAKEFICWLLDTC

SEQ ID NO: 711 - protein, 29 aa, Artificial Sequence
  Synthetic peptide
  MOD_RES (1)..(1): Xaa is DMIA
  MOD_RES (10)..(10): Acylated with C16 fatty acyl group via gamma-Glu spacer
  MOD_RES (29)..(29): C-terminal amidation
XSQGTFTSDKSKYLDEQAAKEFICWLLDT

SEQ ID NO: 712 - protein, 29 aa, Artificial Sequence
  Synthetic peptide
  MOD_RES (1)..(1): des-amino-His
  MOD_RES (10)..(10): Acylated with C16 fatty acyl group via gamma-Glu spacer
  MOD_RES (29)..(29): C-terminal amidation
HSQGTFTSDKSKYLDEQAAKEFICWLLDT

SEQ ID NO: 713 - protein, 29 aa, Artificial Sequence
  Synthetic peptide
  MOD_RES (1)..(1): Ac-His
  MOD_RES (10)..(10): Acylated with C16 fatty acyl group via gamma-Glu spacer
  MOD_RES (24)..(24): PEGYLATION
  MOD_RES (29)..(29): C-terminal amidation
HSQGTFTSDKSKYLDEQAAKEFICWLLDT

SEQ ID NO: 714 - protein, 29 aa, Artificial Sequence
  Synthetic peptide
  MOD_RES (2)..(2): Xaa is AIB
  MOD_RES (10)..(10): Acylated with C16 fatty acyl group via gamma-Glu spacer
  MOD_RES (29)..(29): C-terminal amidation
HXQGTFTSDKSKYLDEEAVRLFIEWLMNT

SEQ ID NO: 715 - protein, 29 aa, Artificial Sequence
  Synthetic peptide
  MOD_RES (2)..(2): Xaa is AIB
  MOD_RES (10)..(10): Acylated with C16 fatty acyl group
  MOD_RES (29)..(29): C-terminal amidation
HXQGTFTSDKSKYLDEEAVRLFIEWLMNT

SEQ ID NO: 716 - protein, 29 aa, Artificial Sequence
  Synthetic peptide
  MOD_RES (2)..(2): Xaa is AIB
  MOD_RES (24)..(24): PEGYLATION
  MOD_RES (29)..(29): C-terminal amidation
HXQGTFTSDYSKYLDEEAVRLFICWLMNT

SEQ ID NO: 717 - protein, 29 aa, Artificial Sequence
  Synthetic peptide
  MOD_RES (2)..(2): Xaa is AIB
  MOD_RES (29)..(29): C-terminal amidation
HXQGTFTSDYSKYLDEEAVRLFIEWLMNT

SEQ ID NO: 718 - protein, 29 aa, Artificial Sequence
  Synthetic peptide
  MOD_RES (2)..(2): Xaa is AIB
  MOD_RES (29)..(29): C-terminal amidation
HXQGTFTSDYSKYLDEEAVRLFICWLMNT

SEQ ID NO: 719 - protein, 29 aa, Artificial Sequence
  Synthetic peptide
  MOD_RES (2)..(2): d-Ser
  MOD_RES (24)..(24): PEGYLATION
  MOD_RES (29)..(29): C-terminal amidation
HSQGTFTSDYSKYLDEEAVRLFICWLMNT

SEQ ID NO: 720 - protein, 29 aa, Artificial Sequence
  Synthetic peptide
  MOD_RES (2)..(2): d-Ser
  MOD_RES (29)..(29): C-terminal amidation
HSQGTFTSDYSKYLDEEAVRLFIEWLMNT

SEQ ID NO: 721 - protein, 29 aa, Artificial Sequence
  Synthetic peptide
  MOD_RES (2)..(2): d-Ser
  MOD_RES (29)..(29): C-terminal amidation
HSQGTFTSDYSKYLDEEAVRLFICWLMNT

SEQ ID NO: 722 - protein, 29 aa, Artificial Sequence
  Synthetic peptide
  MOD_RES (10)..(10): Acylated with C16 fatty acyl group via acidic amino acid spacer
  MOD_RES (29)..(29): C-terminal amidation
HSQGTFTSDKSKYLDEEAVRLFIEWLMNT

SEQ ID NO: 723 - protein, 29 aa, Artificial Sequence
  Synthetic peptide
  MOD_RES (10)..(10): Acylated with C16 fatty acyl group via gamma-Glu spacer
  MOD_RES (29)..(29): C-terminal amidation
HSQGTFTSDKSKYLDEEAVRLFIEWLMNT

SEQ ID NO: 724 - protein, 29 aa, Artificial Sequence
  Synthetic peptide
  MOD_RES (2)..(2): Xaa is AIB
  MISC_FEATURE (16)..(20): Salt bridge
  MISC_FEATURE (17)..(21): Salt bridge
  MOD_RES (24)..(24): PEGYLATION
  MOD_RES (29)..(29): C-terminal amidation
HXQGTFTSDYSKYLDEKRAKEFVCWLMNT

SEQ ID NO: 725 - protein, 29 aa, Artificial Sequence
  Synthetic peptide
  MOD_RES (2)..(2): Xaa is AIB
  MOD_RES (16)..(16): Xaa is AIB
  MISC_FEATURE (16)..(20): Salt bridge
  MISC_FEATURE (17)..(21): Salt bridge
  MOD_RES (24)..(24): PEGYLATION
  MOD_RES (29)..(29): C-terminal amidation
HXQGTFTSDYSKYLDXKRAKEFVCWLMNT

SEQ ID NO: 726 - protein, 29 aa, Artificial Sequence
  Synthetic peptide
  MOD_RES (2)..(2): d-Ser
  MISC_FEATURE (16)..(20): Salt bridge
  MISC_FEATURE (17)..(21): Salt bridge
  MOD_RES (24)..(24): PEGYLATION
  MOD_RES (29)..(29): C-terminal amidation
HSQGTFTSDYSKYLDEKRAKEFVCWLMNT

SEQ ID NO: 727 - protein, 29 aa, Artificial Sequence
  Synthetic peptide
  MOD_RES (2)..(2): d-Ser
  MOD_RES (16)..(16): Xaa is AIB
  MISC_FEATURE (16)..(20): Salt bridge
  MISC_FEATURE (17)..(21): Salt bridge
  MOD_RES (24)..(24): PEGYLATION
  MOD_RES (29)..(29): C-terminal amidation
HSQGTFTSDYSKYLDXKRAKEFVCWLMNT

SEQ ID NO: 728 - protein, 29 aa, Artificial Sequence
  Synthetic peptide
  MOD_RES (2)..(2): d-Ser
  MISC_FEATURE (16)..(20): Salt bridge
  MISC_FEATURE (17)..(21): Salt bridge
  MOD_RES (29)..(29): C-terminal amidation
HSQGTFTSDYSKYLDEKRAKEFVQWLMNT

SEQ ID NO: 729 - protein, 29 aa, Artificial Sequence
  Synthetic peptide
  MOD_RES (2)..(2): D-serine, D-alanine, valine, amino n-butyric acid, glycine, N-methyl serine, aminoisobutyric acid
  MOD_RES (16)..(16): Xaa is AIB
  MISC_FEATURE (16)..(20): Salt bridge
  MISC_FEATURE (17)..(21): Salt bridge
  MOD_RES (29)..(29): C-terminal amidation
HSQGTFTSDYSKYLDXKRAKEFVQWLMNT

SEQ ID NO: 730 - protein, 29 aa, Artificial Sequence
  Synthetic peptide
  MOD_RES (2)..(2): D-serine, D-alanine, valine, amino n-butyric acid, glycine, N-methyl serine, aminoisobutyric acid
  MOD_RES (10)..(10): Acylated with C16 fatty acyl group via gamma-Glu spacer
  MISC_FEATURE (15)..(20): Salt bridge
  MOD_RES (16)..(16): Xaa is AIB
  MISC_FEATURE (16)..(21): Salt bridge
  MOD_RES (29)..(29): C-terminal amidation
HSQGTFTSDKSKYLDXKRAKEFVQWLMNT

SEQ ID NO: 731 - protein, 29 aa, Artificial Sequence
  Synthetic peptide
  MOD_RES (1)..(1): Xaa is DMIA
  MOD_RES (16)..(16): Xaa is AIB
  MISC_FEATURE (16)..(20): Salt bridge
  MISC_FEATURE (17)..(21): Salt bridge
  MOD_RES (24)..(24): PEGYLATION
  MOD_RES (29)..(29): C-terminal amidation
XSQGTFTSDYSKYLDXKRAKEFVCWLMNT

SEQ ID NO: 732 - protein, 29 aa, Artificial Sequence
  Synthetic peptide
  MISC_FEATURE (16)..(20): Salt bridge
  MISC_FEATURE (17)..(21): Salt bridge
  MOD_RES (29)..(29): C-terminal amidation
HSQGTFTSDYSKYLDEKRAKEFVQWLMNT

SEQ ID NO: 733 - protein, 29 aa, Artificial Sequence
  Synthetic peptide
  MOD_RES (2)..(2): D-serine, D-alanine, valine, amino n-butyric acid, glycine, N-methyl serine, aminoisobutyric acid
  MOD_RES (10)..(10): Acylated with C16 fatty acyl group via dipeptide spacer
  MOD_RES (16)..(16): Xaa is AIB
  MOD_RES (29)..(29): C-terminal amidation
HXQGTFTSDKSKYLDXRAAQDFVQWLMDT

SEQ ID NO: 734 - protein, 29 aa, Artificial Sequence
  Synthetic peptide
  MOD_RES (2)..(2): Xaa is AIB
  MOD_RES (10)..(10): Acylated with C16 fatty acyl group via acidic amino acid spacer
  MOD_RES (29)..(29): C-terminal amidation
HXQGTFTSDKSKYLDEQAAKEFICWLLDT

SEQ ID NO: 735 - protein, 29 aa, Artificial Sequence
  Synthetic peptide
  MOD_RES (2)..(2): Xaa is AIB
  MOD_RES (10)..(10): Acylated with C16 fatty acyl group via acidic amino acid spacer
  MOD_RES (24)..(24): PEGYLATION
  MOD_RES (29)..(29): C-terminal amidation
HXQGTFTSDKSKYLDEQAAKEFICWLLDT

SEQ ID NO: 736 - protein, 29 aa, Artificial Sequence
  Synthetic peptide
  MOD_RES (2)..(2): Xaa is AIB
  MOD_RES (10)..(10): Acylated with C16 fatty acyl group via acidic amino acid spacer
  MOD_RES (24)..(24): PEGYLATION
  MOD_RES (29)..(29): C-terminal amidation
HXQGTFTSDKSKYLDERAAQDFVCWLLDT

SEQ ID NO: 737 - protein, 30 aa, Artificial Sequence; identical to SEQ ID NO: 699
  Synthetic peptide
  MOD_RES (2)..(2): Xaa is AIB
  MOD_RES (10)..(10): Acylated with C16 fatty acyl group via acidic amino acid spacer
  MOD_RES (30)..(30): PEGYLATION
  MOD_RES (30)..(30): C-terminal amidation

SEQ ID NO: 738 - protein, 29 aa, Artificial Sequence
  Synthetic peptide
  MOD_RES (10)..(10): Acylated with C16 fatty acyl group via acidic amino acid spacer
  MOD_RES (24)..(24): PEGYLATION
  MOD_RES (29)..(29): C-terminal amidation
HAQGTFTSDKSKYLDERAAQDFVCWLLDT

SEQ ID NO: 739 - protein, 29 aa, Artificial Sequence
  Synthetic peptide
  MOD_RES (2)..(2): D-serine, D-alanine, valine, amino n-butyric acid, glycine, N-methyl serine, aminoisobutyric acid
  MOD_RES (10)..(10): Acylated with C16 fatty acyl group via acidic amino acid spacer
  MOD_RES (29)..(29): C-terminal amidation
HXQGTFTSDKSKYLDEQAAKEFICWLLDT

SEQ ID NO: 740 - protein, 29 aa, Artificial Sequence
  Synthetic peptide
  MOD_RES (2)..(2): D-serine, D-alanine, valine, amino n-butyric acid, glycine, N-methyl serine, aminoisobutyric acid
  MOD_RES (10)..(10): Acylated with C16 fatty acyl group via acidic amino acid spacer
  MOD_RES (29)..(29): C-terminal amidation
HXQGTFTSDKSKYLDERAAQDFVQWLLDT

SEQ ID NO: 741 - protein, 29 aa, Artificial Sequence
  Synthetic peptide
  MOD_RES (2)..(2): D-serine, D-alanine, valine, amino n-butyric acid, glycine, N-methyl serine, aminoisobutyric acid
  MOD_RES (10)..(10): Acylated with C16 fatty acyl group via acidic amino acid spacer
  MOD_RES (29)..(29): C-terminal amidation
HXQGTFTSDKSKYLDERAAQDFVCWLLDT

SEQ ID NO: 742 - protein, 29 aa, Artificial Sequence
  Synthetic peptide
  MOD_RES (2)..(2): D-serine, D-alanine, valine, amino n-butyric acid, glycine, N-methyl serine, aminoisobutyric acid
  MOD_RES (10)..(10): Acylated with C16 fatty acyl group via acidic amino acid spacer
HXQGTFTSDKSKYLDEQAAKEFICWLLDT

SEQ ID NO: 743 - protein, 31 aa, Artificial Sequence
  Synthetic peptide
  MOD_RES (2)..(2): D-serine, D-alanine, valine, amino n-butyric acid, glycine, N-methyl serine, aminoisobutyric acid
  MOD_RES (10)..(10): Acylated with C16 fatty acyl group via acidic amino acid spacer
  MOD_RES (31)..(31): C-terminal amidation
HXQGTFTSDKSKYLDEQAAKEFICWLLDTGE

SEQ ID NO: 744 - protein, 31 aa, Artificial Sequence
  Synthetic peptide
  MOD_RES (2)..(2): D-serine, D-alanine, valine, amino n-butyric acid, glycine, N-methyl serine, aminoisobutyric acid
  MOD_RES (10)..(10): Acylated with C16 fatty acyl group via acidic amino acid spacer
  MOD_RES (24)..(24): PEGYLATION
HXQGTFTSDKSKYLDEQAAKEFICWLLDTGG

SEQ ID NO: 745 - protein, 29 aa, Artificial Sequence
  Synthetic peptide
  MOD_RES (2)..(2): D-serine, D-alanine, valine, amino n-butyric acid, glycine, N-methyl serine, aminoisobutyric acid
  MOD_RES (10)..(10): Acylated with C16 fatty acyl group via acidic amino acid spacer
  MOD_RES (24)..(24): PEGYLATION
  MOD_RES (29)..(29): C-terminal amidation
HXQGTFTSDKSKYLDERAAQDFVCWLLDT

SEQ ID NO: 746 - protein, 30 aa, Artificial Sequence
  Synthetic peptide
  MOD_RES (2)..(2): D-serine, D-alanine, valine, amino n-butyric acid, glycine, N-methyl serine, aminoisobutyric acid
  MOD_RES (10)..(10): Acylated with C16 fatty acyl group via acidic amino acid spacer
  MOD_RES (30)..(30): PEGYLATION
  MOD_RES (30)..(30): C-terminal amidation
HXQGTFTSDKSKYLDERAAQDFVQWLLDTC

SEQ ID NO: 747 - protein, 30 aa, Artificial Sequence
  Synthetic peptide
  MOD_RES (2)..(2): D-serine, D-alanine, valine, amino n-butyric acid, glycine, N-methyl serine, aminoisobutyric acid
  MOD_RES (10)..(10): Acylated with C16 fatty acyl group via acidic amino acid spacer
  MOD_RES (24)..(24): PEGYLATION
  MOD_RES (30)..(30): C-terminal amidation
HXQGTFTSDYSKYLDSRRAQDFVQWLMNTE

SEQ ID NO: 748 - protein, 30 aa, Artificial Sequence
  Synthetic peptide
  MOD_RES (2)..(2): D-serine, D-alanine, valine, amino n-butyric acid, glycine, N-methyl serine, aminoisobutyric acid
  MOD_RES (10)..(10): Acylated with C16 fatty acyl group via acidic amino acid spacer
  MOD_RES (24)..(24): PEGYLATION
HXQGTFTSDKSKYLDEQAAKEFICWLLDTC

SEQ ID NO: 749 - protein, 29 aa, Artificial Sequence
  Synthetic peptide
  MOD_RES (1)..(1): Xaa is DMIA
  MOD_RES (10)..(10): Acylated with C16 fatty acyl group via acidic amino acid spacer
  MOD_RES (29)..(29): C-terminal amidation
XSQGTFTSDKSKYLDEQAAKEFICWLLDT

SEQ ID NO: 750 - protein, 29 aa, Artificial Sequence
  Synthetic peptide
  MOD_RES (1)..(1): des-amino-His
  MOD_RES (10)..(10): Acylated with C16 fatty acyl group via acidic amino acid spacer
  MOD_RES (29)..(29): C-terminal amidation
HSQGTFTSDKSKYLDEQAAKEFICWLLDT

SEQ ID NO: 751 - protein, 29 aa, Artificial Sequence
  Synthetic peptide
  MOD_RES (1)..(1): Ac-His
  MOD_RES (10)..(10): Acylated with C16 fatty acyl group via acidic amino acid spacer
  MOD_RES (24)..(24): PEGYLATION
  MOD_RES (29)..(29): C-terminal amidation
HSQGTFTSDKSKYLDEQAAKEFICWLLDT

SEQ ID NO: 752 - protein, 29 aa, Artificial Sequence
  Synthetic peptide
  MOD_RES (2)..(2): Xaa is AIB
  MOD_RES (10)..(10): Acylated with C16 fatty acyl group via acidic amino acid spacer
  MOD_RES (29)..(29): C-terminal amidation
HXQGTFTSDKSKYLDEEAVRLFIEWLMNT

SEQ ID NO: 753 - protein, 29 aa, Artificial Sequence
  Synthetic peptide
  MOD_RES (2)..(2): D-serine, D-alanine, valine, amino n-butyric acid, glycine, N-methyl serine, aminoisobutyric acid
  MOD_RES (24)..(24): PEGYLATION
  MOD_RES (29)..(29): C-terminal amidation
HXQGTFTSDYSKYLDEEAVRLFICWLMNT

SEQ ID NO: 754 - protein, 29 aa, Artificial Sequence
  Synthetic peptide
  MOD_RES (2)..(2): D-serine, D-alanine, valine, amino n-butyric acid, glycine, N-methyl serine, aminoisobutyric acid
  MOD_RES (29)..(29): C-terminal amidation
HXQGTFTSDYSKYLDEEAVRLFIEWLMNT

SEQ ID NO: 755 - protein, 29 aa, Artificial Sequence
  Synthetic peptide
  MOD_RES (2)..(2): D-serine, D-alanine, valine, amino n-butyric acid, glycine, N-methyl serine, aminoisobutyric acid
  MOD_RES (29)..(29): C-terminal amidation
HXQGTFTSDYSKYLDEEAVRLFICWLMNT

SEQ ID NO: 756 - protein, 29 aa, Artificial Sequence
  Synthetic peptide
  MOD_RES (10)..(10): Acylated with C16 fatty acyl group via acidic amino acid spacer
  MOD_RES (29)..(29): C-terminal amidation
HSQGTFTSDKSKYLDEEAVRLFIEWLMNT

SEQ ID NO: 757 - protein, 29 aa, Artificial Sequence
  Synthetic peptide
  MOD_RES (2)..(2): D-serine, D-alanine, valine, amino n-butyric acid, glycine, N-methyl serine, aminoisobutyric acid
  MISC_FEATURE (16)..(20): Salt bridge
  MISC_FEATURE (17)..(21): Salt bridge
  MOD_RES (24)..(24): PEGYLATION
  MOD_RES (29)..(29): C-terminal amidation
HXQGTFTSDYSKYLDEKRAKEFVCWLMNT

SEQ ID NO: 758 - protein, 29 aa, Artificial Sequence
  Synthetic peptide
  MOD_RES (2)..(2): D-serine, D-alanine, valine, amino n-butyric acid, glycine, N-methyl serine, aminoisobutyric acid
  MOD_RES (16)..(16): Xaa is AIB
  MISC_FEATURE (16)..(20): Salt bridge
  MISC_FEATURE (17)..(21): Salt bridge
  MOD_RES (24)..(24): PEGYLATION
  MOD_RES (29)..(29): C-terminal amidation
HSQGTFTSDYSKYLDXKRAKEFVCWLMNT

SEQ ID NO: 759 - protein, 29 aa, Artificial Sequence
  Synthetic peptide
  MOD_RES (2)..(2): D-serine, D-alanine, valine, amino n-butyric acid, glycine, N-methyl serine, aminoisobutyric acid
  MISC_FEATURE (16)..(20): Salt bridge
  MISC_FEATURE (17)..(21): Salt bridge
  MOD_RES (29)..(29): C-terminal amidation
HSQGTFTSDYSKYLDEKRAKEFVQWLMNT

SEQ ID NO: 760 - protein, 29 aa, Artificial Sequence
  Synthetic peptide
  MOD_RES (2)..(2): D-serine, D-alanine, valine, amino n-butyric acid, glycine, N-methyl serine, aminoisobutyric acid
  MOD_RES (10)..(10): Acylated with C16 fatty acyl group via acidic amino acid spacer
  MISC_FEATURE (15)..(20): Salt bridge
  MOD_RES (16)..(16): Xaa is AIB
  MISC_FEATURE (16)..(21): Salt bridge
  MOD_RES (29)..(29): C-terminal amidation
HSQGTFTSDKSKYLDXKRAKEFVQWLMNT

SEQ ID NO: 761-800 - skipped (40 entries)

SEQ ID NO: 801 - protein, 29 aa, Homo sapiens
HSQGTFTSDYSKYLDSRRAQDFVQWLMNT

SEQ ID NO: 802 - protein, 29 aa, Artificial Sequence
  Glucagon analogue
  MOD_RES (16)..(16): Xaa is Ser, Cys, Orn, homocysteine or acetyl phenyalanine
  MOD_RES (27)..(27): Xaa is Met, Leu or Nle
HSQGTFTSDYSKYLDXRRAQDFVQWLXDT

SEQ ID NO: 803 - protein, 29 aa, Artificial Sequence
  Glucagon analogue
  MOD_RES (17)..(17): Xaa is Arg, Cys, Orn, homocysteine or acetyl phenyalanine
  MOD_RES (27)..(27): Xaa is Met, Leu or Nle
HSQGTFTSDYSKYLDSXRAQDFVQWLXDT

SEQ ID NO: 804 - protein, 29 aa, Artificial Sequence
  Glucagon analogue
  MOD_RES (21)..(21): Xaa is Asp, Cys, Orn, homocysteine or acetyl phenylalanine
  MOD_RES (27)..(27): Xaa is Met, Leu or Nle
HSQGTFTSDYSKYLDSRRAQXFVQWLXDT

SEQ ID NO: 805 - protein, 29 aa, Artificial Sequence
  Synthetic peptide
  MOD_RES (24)..(24): Xaa is Gln, Cys, Orn, homocysteine or acetyl phenylalanine
  MOD_RES (27)..(27): Xaa is Met, Leu or Nle
HSQGTFTSDYSKYLDSRRAQDFVXWLXDT

SEQ ID NO: 806 - protein, 29 aa, Artificial Sequence
  Glucagon analogue
  MOD_RES (21)..(21): Xaa is Asp, Cys, Orn, homocysteine or acetyl phenyalanine
  MOD_RES (24)..(24): Xaa is Gln, Cys, Orn, homocysteine or acetyl phenyalanine
  MOD_RES (27)..(27): Xaa is Met, Leu or Nle
HSQGTFTSDYSKYLDSRRAQXFVXWLXDT

SEQ ID NO: 807 - protein, 29 aa, Artificial Sequence
  Glucagon analogue
  MOD_RES (27)..(27): Xaa is Met, Leu or Nle
  MOD_RES (28)..(28): Xaa is Lys, Arg, His, Asp, Glu, cysteic acid or homocysteic acid
  MOD_RES (29)..(29): Xaa is Thr, Lys, Arg, His, Asp, Glu, cysteic acid or homocysteic acid
HSQGTFTSDYSKYLDSRRAQDFVQWLXXX

SEQ ID NO: 808 - protein, 29 aa, Artificial Sequence
  Glucagon analogue
  MOD_RES (27)..(27): Xaa is Met, Leu or Nle
  MOD_RES (28)..(28): Xaa is Asp or Glu
  MOD_RES (29)..(29): Xaa is Thr, Asp or Glu
HSQGTFTSDYSKYLDSRRAQDFVQWLXXX

SEQ ID NO: 809 - protein, 29 aa, Artificial Sequence
  Glucagon analogue
  MOD_RES (27)..(27): Xaa is Met, Leu or Nle
  MOD_RES (29)..(29): Xaa is Asp or Glu
HSQGTFTSDYSKYLDSRRAQDFVQWLXNX

SEQ ID NO: 810 - protein, 29 aa, Artificial Sequence
  Synthetic peptide
  MOD_RES (27)..(27): Xaa is Met, Leu or Nle
HSQGTFTSDYSKYLDSRRAQDFVQWLXDT

SEQ ID NO: 811 - protein, 29 aa, Artificial Sequence
  Glucagon analogue
HSQGTFTSDYSKYLDSRRAQDFVQWLMDT

SEQ ID NO: 812 - protein, 29 aa, Artificial Sequence
  Glucagon analogue
  MOD_RES (29)..(29): Xaa is Lys, Arg or His
HSQGTFTSDYSKYLDSRRAQDFVQWLMNX

SEQ ID NO: 813 - protein, 29 aa, Artificial Sequence
  Glucagon analogue
HSQGTFTSDYSKYLESRRAQDFVQWLMDT

SEQ ID NO: 814 - protein, 29 aa, Artificial Sequence
  Synthetic peptide
  MOD_RES (16)..(16): Pegylation
  MOD_RES (27)..(27): Xaa is Met, Leu or Nle
HSQGTFTSDYSKYLDCRRAQDFVQWLXDT

SEQ ID NO: 815 - protein, 29 aa, Artificial Sequence
  Glucagon analogue
  MOD_RES (17)..(17): Pegylation
  MOD_RES (27)..(27): Xaa is Met, Leu or Nle
HSQGTFTSDYSKYLDSCRAQDFVQWLXDT

SEQ ID NO: 816 - protein, 29 aa, Artificial Sequence
  Glucagon analogue
  MOD_RES (21)..(21): Pegylation
  MOD_RES (27)..(27): Xaa is Met, Leu or Nle
HSQGTFTSDYSKYLDSRRAQCFVQWLXDT

SEQ ID NO: 817 - protein, 29 aa, Artificial Sequence
  Glucagon analogue
  MOD_RES (24)..(24): Pegylation
  MOD_RES (27)..(27): Xaa is Met, Leu or Nle
HSQGTFTSDYSKYLDSRRAQDFVCWLXDT

SEQ ID NO: 818 - protein, 29 aa, Artificial Sequence
  Glucagon analogue
  MOD_RES (21)..(21): Pegylation
  MOD_RES (27)..(27): Xaa is Met, Leu or Nle
HSQGTFTSDYSRYLDSRRAQKFVQWLXDT

SEQ ID NO: 819 - protein, 29 aa, Artificial Sequence
  Glucagon analogue
  MOD_RES (24)..(24): Pegylation
  MOD_RES (27)..(27): Xaa is Met, Leu or Nle
HSQGTFTSDYSRYLDSRRAQDFVKWLXDT

SEQ ID NO: 820 - protein, 10 aa, Artificial Sequence
  Synthetic peptide
  MISC_FEATURE: Peptide fragment representing carboxy terminal 10 amino acids of Exendin-4
GPSSGAPPPS

SEQ ID NO: 821 - protein, 8 aa, Artificial Sequence
  Synthetic peptide
  MISC_FEATURE: Peptide fragment representing the carboxy terminal 8 amino acids of oxyntomodulin
KRNRNNIA

SEQ ID NO: 822 - protein, 4 aa, Artificial Sequence
  Synthetic peptide
  MISC_FEATURE: Peptide fragment representing the amino 4 amino acids of oxyntomodulin carboxy terminus of SEQ ID NO: 21
KRNR

SEQ ID NO: 823 - protein, 10 aa, Artificial Sequence
  Synthetic peptide
  MISC_FEATURE: Peptide fragment representing the carboxy terminal 10 amino acids of Exendin-4
  MOD_RES (10)..(10): AMIDATION
GPSSGAPPPS

SEQ ID NO: 824 - protein, 39 aa, Artificial Sequence
  Glucagon analogue
HSQGTFTSDYSKYLDSRRAQDFVQWLMDTGPSSGAPPPS

SEQ ID NO: 825 - protein, 37 aa, Artificial Sequence
  Glucagon analogue
HSQGTFTSDYSKYLDSRRAQDFVQWLMDTKRNRNNIA

SEQ ID NO: 826 - protein, 33 aa, Artificial Sequence
  Glucagon analogue
HSQGTFTSDYSKYLDSRRAQDFVQWLMDTKRNR

SEQ ID NO: 827 - protein, 29 aa, Artificial Sequence
  Glucagon analogue
HSQGTFTSDYSKYLDSCRAQDFVQWLMNT

SEQ ID NO: 828 - protein, 39 aa, Artificial Sequence; identical to SEQ ID NO: 36
  Synthetic peptide

SEQ ID NO: 829 - protein, 29 aa, Artificial Sequence
  Glucagon analogue
  MOD_RES (24)..(24): 2-butyrolactone bound through Cys thiol group
HSQGTFTSDYSKYLDSRRAQDFVQWLMNT

SEQ ID NO: 830 - protein, 29 aa, Artificial Sequence
  Glucagon analogue
  MOD_RES (24)..(24): Carboxymethyl group bound through Cys thiol group
HSQGTFTSDYSKYLDSRRAQDFVQWLMNT

SEQ ID NO: 831 - protein, 39 aa, Artificial Sequence; identical to SEQ ID NO: 36
  Glucagon analogue

SEQ ID NO: 832 - protein, 30 aa, Artificial Sequence
  Glucagon analog
  MOD_RES (30)..(30): Xaa is Asp, Glu, Lys, Arg or His
HSQGTFTSDYSKYLDSRRAQDFVQWLMDTX

SEQ ID NO: 833 - protein, 29 aa, Artificial Sequence
  Glucagon analogue
  MOD_RES (15)..(15): Xaa is Asp, Glu, cysteic acid, homoglutamic acid or homocysteic acid
  MOD_RES (27)..(27): Xaa is Met, Leu or Nle
  MOD_RES (28)..(28): Xaa is Asn, Lys, Arg, His, Asp or Glu
  MOD_RES (29)..(29): Xaa is Thr, Lys, Arg, His, Asp or Glu
HSQGTFTSDYSKYLXSRRAQDFVQWLXXX

SEQ ID NO: 834 - protein, 29 aa, Artificial Sequence
  Glucagon analogue
  MOD_RES (15)..(15): Xaa is Asp, Glu, cysteic acid, homoglutamic acid or homocysteic acid
  MOD_RES (27)..(27): Xaa is Met, Leu or Nle
  MOD_RES (28)..(28): Xaa is Asn or an acidic amino acid
  MOD_RES (29)..(29): Xaa is Thr or an acidic amino acid
HSQGTFTSDYSKYLXSRRAQDFVQWLXXX

SEQ ID NO: 835 - protein, 39 aa, Artificial Sequence
  Synthetic peptide
HSQGTFTSDYSKYLDSRRAQDFVQWLMETGPSSGAPPPS

SEQ ID NO: 836 - protein, 37 aa, Artificial Sequence
  Glucagon analogue
HSQGTFTSDYSKYLDSRRAQDFVQWLMETKRNRNNIA

SEQ ID NO: 837 - protein, 33 aa, Artificial Sequence
  Glucagon analogue
HSQGTFTSDYSKYLDSRRAQDFVQWLMETKRNR

SEQ ID NO: 838 - protein, 29 aa, Artificial Sequence
  Glucagon analogue
HSQGTFTSDYSKYLDSRRAQDFVQWLMET

SEQ ID NO: 839 - protein, 27 aa, Artificial Sequence
  Synthetic peptide
  MOD_RES (1)..(1): Xaa is any amino acid
  MOD_RES (2)..(2): Xaa is any amino acid
  MOD_RES (27)..(27): Met comprises Z
XXQGTFTSDYSKYLDSRRAQDFVQWLM

SEQ ID NO: 840 - protein, 29 aa, Artificial Sequence
  Synthetic peptide
  MOD_RES (1)..(1): Xaa is alpha, alpha-dimethyl imidiazole acetic acid (DMIA)
  MISC_FEATURE (16)..(20): Lactam bridge between residues 16 and 20
  MOD_RES (24)..(24): Pegylation
XSQGTFTSDYSKYLDERRAKDFVCWLMNT

SEQ ID NO: 841 - protein, 29 aa, Artificial Sequence
  Synthetic peptide
  MOD_RES (1)..(1): Xaa is alpha, alpha-dimethyl imidiazole acetic acid (DMIA)
  MISC_FEATURE (16)..(20): Lactam bridge between residues 16 and 20
  MOD_RES (24)..(24): Glutamine to alanine mutation
  MOD_RES (29)..(29): Pegylation
XSQGTFTSDYSKYLDERRAKDFVAWLMNC

SEQ ID NO: 842 - protein, 29 aa, Artificial Sequence
  Synthetic peptide
  MOD_RES (1)..(1): Xaa is alpha, alpha-dimethyl imidiazole acetic acid (DMIA)
  MISC_FEATURE (16)..(20): Lactam bridge between residues 16 and 20
  MOD_RES (24)..(24): Pegylation
  MOD_RES (27)..(27): Xaa is Nle or Leu
XSQGTFTSDYSKYLDERRAKDFVCWLXNT

SEQ ID NO: 843 - protein, 29 aa, Artificial Sequence
  Synthetic peptide
  MOD_RES (1)..(1): Xaa is alpha, alpha-dimethyl imidiazole acetic acid (DMIA)
  MISC_FEATURE (16)..(20): Lactam bridge between residues 16 and 20
  MISC_FEATURE (24)..(24): Glutamine to alanine mutation
  MISC_FEATURE (27)..(27): Xaa is Nle or Leu
  MOD_RES (29)..(29): Pegylation
XSQGTFTSDYSKYLDERRAKDFVAWLXNC

SEQ ID NO: 844 - protein, 29 aa, Artificial Sequence
  Synthetic peptide
  MISC_FEATURE: SEQ ID NO: 1 with  Ala 20, Ala 24, Nle 27, and Asp 28
  MOD_RES (27)..(27): Xaa is Nle
HSQGTFTSDYSKYLDSRRAADFVAWLXDT

SEQ ID NO: 845 - protein, 29 aa, Artificial Sequence
  Synthetic peptide
  MISC_FEATURE: SEQ ID NO: 1 with Ala 20, Ala 24, Nle27 , Asp 28, and Glu 29
  MOD_RES (27)..(27): Xaa is Nle
HSQGTFTSDYSKYLDSRRAADFVAWLXDE

SEQ ID NO: 846 - protein, 30 aa, Artificial Sequence
  Synthetic peptide
  MISC_FEATURE: SEQ ID NO: 1 with Ala 20, Ala 24, Nle 27, Asp 28, and Glu 30
  MOD_RES (27)..(27): Xaa is Nle
HSQGTFTSDYSKYLDSRRAADFVAWLXDTE

SEQ ID NO: 847 - protein, 29 aa, Artificial Sequence
  Synthetic peptide
  MISC_FEATURE: SEQ ID NO: 1 with Ala 20, Ala 24, Nle 27, Glu 28, and Glu 29
  MOD_RES (27)..(27): Xaa is Nle
HSQGTFTSDYSKYLDSRRAADFVAWLXEE

SEQ ID NO: 848 - protein, 30 aa, Artificial Sequence
  Synthetic peptide
  MISC_FEATURE: SEQ ID NO: 1 with Ala 20, Ala 24, Nle 27, Glu 28, and Glu 30
  MOD_RES (27)..(27): Xaa is Nle
HSQGTFTSDYSKYLDSRRAADFVAWLXETE

SEQ ID NO: 849 - protein, 30 aa, Artificial Sequence
  Synthetic peptide
  MOD_RES (27)..(27): Xaa is Nle
  MISC_FEATURE (27)..(27): SEQ ID NO: 1 with Ala 20, Ala 24, Nle 27, Glu 29, and Glu 30
HSQGTFTSDYSKYLDSRRAADFVAWLXNEE

SEQ ID NO: 850 - protein, 29 aa, Artificial Sequence
  Synthetic peptide
  MISC_FEATURE: SEQ ID NO: 1 with Ala 20, Glu 21, Ala 24, Nle 27, and Asp 28
  MOD_RES (27)..(27): Xaa is Nle
HSQGTFTSDYSKYLDSRRAAEFVAWLXDT

SEQ ID NO: 851 - protein, 29 aa, Artificial Sequence
  Synthetic peptide
  MISC_FEATURE: SEQ ID NO: 1 with Ala 20, Glu 21, Ala 24, Nle 27, Asp 28, and Glu 29
  MOD_RES (27)..(27): Xaa is Nle
HSQGTFTSDYSKYLDSRRAAEFVAWLXDE

SEQ ID NO: 852 - protein, 29 aa, Artificial Sequence
  Synthetic peptide
  MISC_FEATURE: SEQ ID NO: 1 with Ala 20, Glu 21, Ala 24, Nle 27, Asp 28, and Glu 30
  MOD_RES (27)..(27): Xaa is Nle
HSQGTFTSDYSKYLDSRRAAEFVAWLXDE

SEQ ID NO: 853 - protein, 29 aa, Artificial Sequence
  Synthetic peptide
  MISC_FEATURE: SEQ ID NO :1 with Ala 20, Glu 21, Ala 24, Nle 27, Glu 28, and Glu 29
  MOD_RES (27)..(27): Xaa is Nle
HSQGTFTSDYSKYLDSRRAAEFVAWLXEE

SEQ ID NO: 854 - protein, 29 aa, Artificial Sequence
  Synthetic peptide
  MISC_FEATURE: SEQ ID NO: 1 with Ala 20, Glu 21, Ala 24, Nle 27, Glu 28, and Glu 30
HSQGTFTSDYSKYLDSRRAQDFVQWLMNT

SEQ ID NO: 855 - protein, 30 aa, Artificial Sequence
  Synthetic peptide
  MISC_FEATURE: SEQ ID NO: 1 with Ala 20, Glu 21, Ala 24, Nle 27, Glu 29, and Glu 30
  MOD_RES (27)..(27): Xaa is Nle
HSQGTFTSDYSKYLDSRRAAEFVAWLXNEE

SEQ ID NO: 856 - protein, 29 aa, Artificial Sequence
  Synthetic peptide
  MISC_FEATURE: SEQ ID NO: 1 with Thr 16, Ala 20, Glu 21, Ala 24, Nle 27, Asp 28, and Glu29
  MOD_RES (27)..(27): Xaa is Nle
HSQGTFTSDYSKYLDTRRAAEFVAWLXDE

SEQ ID NO: 857 - protein, 31 aa, Homo sapiens; identical to SEQ ID NO: 50

SEQ ID NO: 858 - protein, 30 aa, Homo sapiens; identical to SEQ ID NO: 52
  MOD_RES (30)..(30): AMIDATION

SEQ ID NO: 859 - protein, 29 aa, Artificial Sequence
  Synthetic peptide
  MOD_RES (3)..(3): Xaa is Glutamine analog
  MOD_RES (27)..(27): Xaa is Nle
HSXGTFTSDYSKYLDTRRAAEFVAWLXDE

SEQ ID NO: 860 - protein, 29 aa, Artificial Sequence
  Synthetic peptide
  MOD_RES (3)..(3): Xaa is Glutamine analog
  MOD_RES (16)..(16): Xaa is Aminoisobutryic acid
HSXGTFTSDYSKYLDXRRAADFVAWLMDE

SEQ ID NO: 861 - protein, 29 aa, Artificial Sequence
  Synthetic peptide
  MOD_RES (27)..(27): Xaa is Nle
HSQGTFTSDYSKYLDTRRAAEFVAWLXDE

SEQ ID NO: 862 - protein, 29 aa, Artificial Sequence
  Synthetic peptide
  MOD_RES (3)..(3): Xaa is Acetamidomethyl-cysteine
  MOD_RES (27)..(27): Xaa is Nle
HSXGTFTSDYSKYLDTRRAAEFVAWLXDE

SEQ ID NO: 863 - protein, 29 aa, Artificial Sequence
  Synethic peptide
  MOD_RES (3)..(3): Xaa is Acetyldiaminobutanoic acid
  MOD_RES (27)..(27): Xaa is Nle
HSXGTFTSDYSKYLDTRRAAEFVAWLXDE

SEQ ID NO: 864 - protein, 29 aa, Artificial Sequence
  Synthetic peptide
  MOD_RES (3)..(3): Xaa is Carbamoyldiaminopropanoic acid
  MOD_RES (27)..(27): Xaa is Nle
HSXGTFTSDYSKYLDTRRAAEFVAWLXDE

SEQ ID NO: 865 - protein, 29 aa, Artificial Sequence
  Synthetic peptide
  MOD_RES (3)..(3): Xaa is Methylglutamine
  MOD_RES (27)..(27): Xaa is Nle
HSXGTFTSDYSKYLDTRRAAEFVAWLXDE

SEQ ID NO: 866 - protein, 29 aa, Artificial Sequence
  Synthetic peptide
  MOD_RES (3)..(3): Xaa is Methionine sulfoxide
  MOD_RES (27)..(27): Xaa is Nle
HSXGTFTSDYSKYLDTRRAAEFVAWLXDE

SEQ ID NO: 867 - protein, 29 aa, Artificial Sequence
  Synthetic peptide
  MOD_RES (3)..(3): Xaa is Acetylornithine
  MOD_RES (27)..(27): Xaa is Nle
HSXGTFTSDYSKYLDTRRAAEFVAWLXDE

SEQ ID NO: 868 - protein, 29 aa, Artificial Sequence
  Synthetic peptide
  MOD_RES (16)..(16): Xaa is Aminoisobutryic acid
HSQGTFTSDYSKYLDXRRAADFVAWLMDE

SEQ ID NO: 869 - protein, 29 aa, Artificial Sequence
  Synthetic peptide
  MOD_RES (3)..(3): Xaa is Acetyldiaminobutanoic acid
  MOD_RES (16)..(16): Xaa is Aminoisobutryic acid
HSXGTFTSDYSKYLDXRRAADFVAWLMDE

SEQ ID NO: 870 - protein, 29 aa, Artificial Sequence
  Synthetic peptide
  MOD_RES (3)..(3): Xaa is Methylglutamine
  MOD_RES (16)..(16): Xaa is Aib
HSXGTFTSDYSKYLDXRRAADFVAWLMDE

SEQ ID NO: 871 - protein, 29 aa, Artificial Sequence
  Synthetic peptide
  MOD_RES (3)..(3): Xaa is acetyldiaminobutanoic acid
  MOD_RES (16)..(16): Xaa is Aib
HSXGTFTSDYSKYLDXRRAADFVAWLLDE

SEQ ID NO: 872 - protein, 39 aa, Artificial Sequence; identical to SEQ ID NO: 604
  Synthetic peptide
  MOD_RES (3)..(3): Xaa is Acetyldiaminobutanoic acid
  MOD_RES (16)..(16): Aminoisobutryic Acid
  MOD_RES (39)..(39): AMIDATION

SEQ ID NO: 873 - protein, 29 aa, Artificial Sequence
  Synthetic peptide
  MOD_RES (3)..(3): Xaa is Acetyldiaminobutanoic acid
  MOD_RES (16)..(16): Xaa is Aminoisobutryric acid
HSXGTFTSDYSKYLDXRRASDFVSWLLDE

SEQ ID NO: 874 - protein, 29 aa, Artificial Sequence
  Synthetic peptide
  MOD_RES (3)..(3): Xaa is Acetyldiaminobutanoic acid
  MOD_RES (16)..(16): Xaa is Aminoisobutryic acid
HSXGTFTSDYSKYLDXRRATDFVTWLLDE

SEQ ID NO: 875 - protein, 29 aa, Artificial Sequence
  Synthetic peptide
HSQGTFTSDYSKYLDSRRAQDFVQWLMDE

SEQ ID NO: 876 - protein, 29 aa, Artificial Sequence
  Synthetic peptide
  MOD_RES (16)..(16): Xaa is Aib
HSQGTFTSDYSKYLDXRRAQDFVQWLMDE

SEQ ID NO: 877 - protein, 29 aa, Artificial Sequence
  Synthetic peptide
  misc_feature (3)..(3): Xaa can be any naturally occurring amino acid
HSXGTFTSDYSKYLDSRRAQDFVQWLMNT

SEQ ID NO: 878 - protein, 29 aa, Artificial Sequence
  Synthetic peptide
HSQGTFTSDYSKYLDSRRAQDFVQWLMDT

SEQ ID NO: 879 - protein, 30 aa, Artificial Sequence; identical to SEQ ID NO: 581
  Synthetic peptide
  MOD_RES (2)..(2): Xaa is d-Ser
  MOD_RES (30)..(30): Acylated with a C14 fatty acyl group
  MOD_RES (30)..(30): AMIDATION

SEQ ID NO: 880 - protein, 29 aa, Artificial Sequence
  Synthetic peptide
  MOD_RES (2)..(2): Xaa is d-Ser
  MOD_RES (10)..(10): Acylated with a C14 fatty acyl group
  MOD_RES (29)..(29): AMIDATION
HXQGTFTSDKSKYLDERRAKDFVQWLMNT

SEQ ID NO: 881 - protein, 30 aa, Artificial Sequence; identical to SEQ ID NO: 581
  Synthetic peptide
  MOD_RES (2)..(2): Xaa is d-Ser
  MOD_RES (30)..(30): Acylated with a C16 fatty acyl group
  MOD_RES (30)..(30): AMIDATION

SEQ ID NO: 882 - protein, 29 aa, Artificial Sequence
  Synthetic peptide
  MOD_RES (2)..(2): Xaa is d-Ser
  MOD_RES (10)..(10): Acylated with a C16 fatty acyl group
  MOD_RES (29)..(29): AMIDATION
HXQGTFTSDKSKYLDERRAKDFVQWLMNT

SEQ ID NO: 883 - protein, 29 aa, Artificial Sequence
  Synthetic peptide
  MOD_RES (2)..(2): Aminoisobutryic Acid
  MOD_RES (10)..(10): Acylated with a C18 fatty acyl group
  MOD_RES (24)..(24): Cys-PEG
  MOD_RES (29)..(29): AMIDATION
HXQGTFTSDKSKYLDEQAAKEFICWLMNT

SEQ ID NO: 884 - protein, 30 aa, Artificial Sequence; identical to SEQ ID NO: 586
  Synthetic peptide
  MOD_RES (2)..(2): Aminoisobutryic Acid
  MOD_RES (24)..(24): Cys-PEG
  MOD_RES (30)..(30): Acylated with a C18 fatty acyl group
  MOD_RES (30)..(30): AMIDATION

SEQ ID NO: 885 - protein, 29 aa, Artificial sequence
  Synthetic peptide
  MOD_RES (16)..(16): Xaa is Ser or alpha, alpha-disubstituted amino acid
  MOD_RES (20)..(20): Xaa is Gln or alpha, alpha-disubstituted amino acid
  MOD_RES (21)..(21): Xaa is Asp or alpha, alpha-disubstituted amino acid
  MOD_RES (24)..(24): Xaa is Gln or alpha, alpha-disubstituted amino acid
HSQGTFTSDYSKYLDXRRAXXFVXWLMNT

SEQ ID NO: 886 - protein, 29 aa, Artificial Sequence
  Synthetic peptide
  MOD_RES (16)..(16): Xaa is Aib
HSQGTFTSDYSKYLDXRRAQDFVQWLMNT

SEQ ID NO: 887 - protein, 29 aa, Artificial Sequence
  Synthetic peptide
  MOD_RES (19)..(19): Xaa is Aib
HSQGTFTSDYSKYLDSRRXQDFVQWLMNT

SEQ ID NO: 888 - protein, 29 aa, Artificial Sequence
  Synthetic peptide
  MOD_RES (20)..(20): Xaa is Aib
HSQGTFTSDYSKYLDSRRAXDFVQWLMNT

SEQ ID NO: 889 - protein, 29 aa, Artificial Sequence
  Synthetic peptide
  MOD_RES (21)..(21): Xaa is Aib
HSQGTFTSDYSKYLDSRRAQXFVQWLMNT

SEQ ID NO: 890 - protein, 29 aa, Artificial Sequence
  Synthetic peptide
  MOD_RES (24)..(24): Xaa is Aib
HSQGTFTSDYSKYLDSRRAQDFVXWLMNT

SEQ ID NO: 891 - protein, 29 aa, Artificial Sequence
  Synthetic peptide
  MOD_RES (16)..(16): Xaa is Aib
  MOD_RES (20)..(20): Xaa is Aib
HSQGTFTSDYSKYLDXRRAXDFVQWLMNT

SEQ ID NO: 892 - protein, 29 aa, Artificial Sequence
  Synthetic peptide
  MOD_RES (16)..(16): Xaa is Aib
  MOD_RES (24)..(24): Xaa is Aib
HSQGTFTSDYSKYLDXRRAQDFVXWLMNT

SEQ ID NO: 893 - protein, 29 aa, Artificial Sequence
  Synthetic peptide
  MOD_RES (20)..(20): Xaa is Aib
  MOD_RES (24)..(24): Xaa is Aib
HSQGTFTSDYSKYLDSRRAXDFVXWLMNT

SEQ ID NO: 894 - protein, 29 aa, Artificial Sequence
  Synthetic peptide
  MOD_RES (16)..(16): Xaa is Aib
  MOD_RES (20)..(20): Xaa is Aib
  MOD_RES (24)..(24): Xaa is Aib
HSQGTFTSDYSKYLDXRRAXDFVXWLMNT

SEQ ID NO: 895 - protein, 29 aa, Artificial Sequence
  Synthetic peptide
  MOD_RES (2)..(2): Xaa is Aib
  MOD_RES (16)..(16): Xaa is Aib
  MOD_RES (29)..(29): AMIDATION
HXQGTFTSDKSKYLDXRRAQDFVQWLMNT

SEQ ID NO: 896 - protein, 29 aa, Artificial Sequence
  Synthetic peptide
  MOD_RES (2)..(2): Xaa is Aib
  MOD_RES (16)..(16): Xaa is Aib
  MOD_RES (29)..(29): AMIDATION
HXQGTFTSDYSKYLDXRRAQDFVQWLMNT

SEQ ID NO: 897 - protein, 29 aa, Artificial Sequence
  Synthetic peptide
  MOD_RES (2)..(2): Xaa is Aib
  MOD_RES (10)..(10): Acylated with a C16 fatty acyl group
  MOD_RES (16)..(16): Xaa is Aib
  MOD_RES (29)..(29): AMIDATION
HXQGTFTSDKSKYLDXRRAQDFVQWLMNT

SEQ ID NO: 898 - protein, 29 aa, Artificial Sequence
  Synthetic peptide
  MOD_RES (2)..(2): Xaa is Aib
  MOD_RES (10)..(10): Acylated with a C16 fatty acyl group via Ala-Ala spacer
  MOD_RES (16)..(16): Xaa is Aib
  MOD_RES (29)..(29): AMIDATION
HXQGTFTSDKSKYLDXRRAQDFVQWLMNT

SEQ ID NO: 899 - protein, 29 aa, Artificial Sequence
  Synthetic peptide
  MOD_RES (2)..(2): Xaa is Aib
  MOD_RES (10)..(10): Acylated with a C16 fatty acyl group via dipeptide spacer
  MOD_RES (16)..(16): Xaa is Aib
  MOD_RES (29)..(29): AMIDATION
HXQGTFTSDKSKYLDXRRAQDFVQWLMNT

SEQ ID NO: 900 - protein, 29 aa, Artificial Sequence
  Synthetic peptide
  MOD_RES (2)..(2): Xaa is Aib
  MOD_RES (10)..(10): Acylated with a C16 fatty acyl group via beta-Ala-beta-Ala spacer
  MOD_RES (16)..(16): Xaa is Aib
  MOD_RES (29)..(29): AMIDATION
HXQGTFTSDKSKYLDXRRAQDFVQWLMNT

SEQ ID NO: 901 - protein, 29 aa, Artificial Sequence
  Synthetic peptide
  MOD_RES (2)..(2): Xaa is Aib
  MOD_RES (10)..(10): Acylated with a C16 fatty acyl group via 6-aminohexanoic acid spacer
  MOD_RES (16)..(16): Xaa is Aib
  MOD_RES (29)..(29): AMIDATION
HXQGTFTSDKSKYLDXRRAQDFVQWLMNT

SEQ ID NO: 902 - protein, 29 aa, Artificial Sequence
  Synthetic peptide
  MOD_RES (2)..(2): Xaa is Aib
  MOD_RES (10)..(10): Acylated with a C16 fatty acyl group via Leu-Leu spacer
  MOD_RES (16)..(16): Xaa is Aib
  MOD_RES (29)..(29): AMIDATION
HXQGTFTSDKSKYLDXRRAQDFVQWLMNT

SEQ ID NO: 903 - protein, 29 aa, Artificial Sequence
  Synthetic peptide
  MOD_RES (2)..(2): Xaa is Aib
  MOD_RES (10)..(10): Acylated with a C16 fatty acyl group via Pro-Pro spacer
  MOD_RES (16)..(16): Xaa is Aib
  MOD_RES (29)..(29): AMIDATION
HXQGTFTSDKSKYLDXRRAQDFVQWLMNT

SEQ ID NO: 904 - protein, 29 aa, Artificial Sequence
  Synthetic peptide
  MOD_RES (2)..(2): Xaa is Aib
  MOD_RES (10)..(10): Acylated with a C14 fatty acyl group
  MOD_RES (16)..(16): Xaa is Aib
  MOD_RES (24)..(24): Cys-PEG
  MOD_RES (29)..(29): AMIDATION
HXQGTFTSDKSKYLDXRRAQDFVCWLMNT

SEQ ID NO: 905 - protein, 29 aa, Artificial Sequence
  Synthetic peptide
  MOD_RES (2)..(2): Xaa is Aib
  MOD_RES (10)..(10): Acylated with a C14 fatty acyl group via dipeptide spacer
  MOD_RES (16)..(16): Xaa is Aib
  MOD_RES (24)..(24): Cys-PEG
  MOD_RES (29)..(29): AMIDATION
HXQGTFTSDKSKYLDXRRAQDFVCWLMNT

SEQ ID NO: 906 - protein, 29 aa, Artificial Sequence
  Synthetic peptide
  MOD_RES (2)..(2): Xaa is Aib
  MOD_RES (10)..(10): Acylated with a C14 fatty acyl group via dipeptide spacer
  MOD_RES (16)..(16): Xaa is Aib
  MOD_RES (29)..(29): AMIDATION
HXQGTFTSDKSKYLDXRRAQDFVQWLMNT

SEQ ID NO: 907 - protein, 29 aa, Artificial Sequence
  Synthetic peptide
  MOD_RES (2)..(2): Xaa is Aib
  MOD_RES (10)..(10): Acylated with a C14 fatty acyl group via Ala-Ala spacer
  MOD_RES (16)..(16): Xaa is Aib
  MOD_RES (24)..(24): Cys-PEG
  MOD_RES (29)..(29): AMIDATION
HXQGTFTSDKSKYLDXRRAQDFVCWLMNT

SEQ ID NO: 908 - protein, 29 aa, Artificial Sequence
  Synthetic peptide
  MOD_RES (2)..(2): Xaa is Aib
  MOD_RES (10)..(10): Acylated with a C14 fatty acyl group via Ala-Ala spacer
  MOD_RES (16)..(16): Xaa is Aib
  MOD_RES (29)..(29): AMIDATION
HXQGTFTSDKSKYLDXRRAQDFVQWLMNT

SEQ ID NO: 909 - protein, 29 aa, Artificial Sequence
  Synthetic peptide
  MOD_RES (2)..(2): Xaa is Aib
  MOD_RES (10)..(10): Acylated with a C16 fatty acyl group via Ala-Ala spacer
  MOD_RES (16)..(16): Xaa is Aib
  MOD_RES (24)..(24): Cys-PEG
  MOD_RES (29)..(29): AMIDATION
HXQGTFTSDKSKYLDXRRAQDFVCWLMNT

SEQ ID NO: 910 - protein, 29 aa, Artificial Sequence
  Synthetic peptide
  MOD_RES (2)..(2): Xaa is Aib
  MOD_RES (10)..(10): Acylated with a C16 fatty acyl group via dipeptide spacer
  MOD_RES (16)..(16): Xaa is Aib
  MOD_RES (24)..(24): Cys-PEG
  MOD_RES (29)..(29): AMIDATION
HXQGTFTSDKSKYLDXRRAQDFVCWLMNT

SEQ ID NO: 911 - protein, 29 aa, Artificial Sequence
  Synthetic peptide
  MOD_RES (2)..(2): Xaa is Aib
  MOD_RES (10)..(10): Covalently bound to a C14 fatty acyl group
  MOD_RES (16)..(16): Xaa is Aib
  MOD_RES (29)..(29): AMIDATION
HXQGTFTSDKSKYLDXRRAQDFVCWLMNT

SEQ ID NO: 912 - protein, 29 aa, Artificial Sequence
  Synthetic peptide
  MOD_RES (2)..(2): Xaa is Aib
  MOD_RES (10)..(10): Covalently bound to C14 fatty acyl group via dipeptide spacer
  MOD_RES (16)..(16): Xaa is Aib
  MOD_RES (29)..(29): AMIDATION
HXQGTFTSDKSKYLDXRRAQDFVCWLMNT

SEQ ID NO: 913 - protein, 29 aa, Artificial Sequence
  Synthetic peptide
  MOD_RES (2)..(2): Xaa is Aib
  MOD_RES (10)..(10): Covalently bound to C14 fatty acyl group via Ala-Ala spacer
  MOD_RES (16)..(16): Xaa is Aib
  MOD_RES (29)..(29): AMIDATION
HXQGTFTSDKSKYLDXRRAQDFVCWLMNT

SEQ ID NO: 914 - protein, 29 aa, Artificial Sequence
  Synthetic peptide
  MOD_RES (2)..(2): Xaa is Aib
  MOD_RES (10)..(10): Covalently bound to C16 fatty acyl group via dipeptide spacer
  MOD_RES (16)..(16): Xaa is Aib
  MOD_RES (29)..(29): AMIDATION
HXQGTFTSDKSKYLDXRRAQDFVCWLMNT

SEQ ID NO: 915 - protein, 29 aa, Artificial Sequence
  Synthetic peptide
  MOD_RES (2)..(2): Xaa is Aib
  MOD_RES (10)..(10): Covelently bound to C16 fatty acyl group via Ala-Ala spacer
  MOD_RES (16)..(16): Xaa is Aib
  MOD_RES (29)..(29): AMIDATION
HXQGTFTSDKSKYLDXRRAQDFVCWLMNT

SEQ ID NO: 916 - protein, 30 aa, Artificial Sequence; identical to SEQ ID NO: 581
  Synthetic peptide
  MOD_RES (2)..(2): D-serine, D-alanine, valine, amino n-butyric acid, glycine, N-methyl serine, aminoisobutyric acid
  MOD_RES (30)..(30): Acylated with a C14 fatty acyl group
  MOD_RES (30)..(30): AMIDATION

SEQ ID NO: 917 - protein, 29 aa, Artificial Sequence
  Synthetic peptide
  MOD_RES (2)..(2): D-serine, D-alanine, valine, amino n-butyric acid, glycine, N-methyl serine, aminoisobutyric acid
  MOD_RES (10)..(10): Acylated with a C14 fatty acyl group
  MOD_RES (29)..(29): AMIDATION
HXQGTFTSDKSKYLDERRAKDFVQWLMNT

SEQ ID NO: 918 - protein, 30 aa, Artificial Sequence; identical to SEQ ID NO: 581
  Synthetic peptide
  MOD_RES (2)..(2): D-serine, D-alanine, valine, amino n-butyric acid, glycine, N-methyl serine, aminoisobutyric acid
  MOD_RES (30)..(30): Acylated with a C16 fatty acyl group
  MOD_RES (30)..(30): AMIDATION

SEQ ID NO: 919 - protein, 29 aa, Artificial Sequence
  Synthetic peptide
  MOD_RES (2)..(2): D-serine, D-alanine, valine, amino n-butyric acid, glycine, N-methyl serine, aminoisobutyric acid
  MOD_RES (10)..(10): Acylated with a C16 fatty acyl group
  MOD_RES (29)..(29): AMIDATION
HXQGTFTSDKSKYLDERRAKDFVQWLMNT

SEQ ID NO: 920-1000 - skipped (81 entries)

SEQ ID NO: 1001 - protein, 29 aa, Homo sapiens
  MISC_FEATURE: Wild type glucagon
HSQGTFTSDYSKYLDSRRAQDFVQWLMNT

SEQ ID NO: 1002 - protein, 31 aa, Homo sapiens; identical to SEQ ID NO: 50
  MISC_FEATURE (1)..(31): GLP-1(7-37)

SEQ ID NO: 1003 - protein, 30 aa, Artificial sequence; identical to SEQ ID NO: 52
  Synthetic polypeptide
  MISC_FEATURE (1)..(30): GLP-1(7-36) amidated
  MISC_FEATURE (30)..(30): C-terminal amidation

SEQ ID NO: 1004 - protein, 42 aa, Homo sapiens
  mat_peptide (1)..(42): gastric inhibitory polypeptide
YAEGTFISDYSIAMDKIHQQDFVNWLLAQKGKKNDWKHNITQ

SEQ ID NO: 1005 - protein, 29 aa, Artificial sequence
  Synthetic polypeptide
  MISC_FEATURE: Analog 61
  MISC_FEATURE (16)..(20): Lactam bridge between residues 16 and 20.
HSQGTFTSDYSKYLDEIHQKEFIAWLMNT

SEQ ID NO: 1006 - protein, 29 aa, Artificial sequence
  Synthetic polypeptide
  MISC_FEATURE: Analog 62
  MISC_FEATURE (16)..(20): Lactam bridge between residues 16 and 20.
HSQGTFTSDYSIYLDEIHQKEFIAWLMNT

SEQ ID NO: 1007 - protein, 29 aa, Artificial sequence
  Synthetic polypeptide
  MISC_FEATURE: Analog 63
  MISC_FEATURE (12)..(16): Lactam bridge between residues 12 and 16.
HSQGTFTSDYSKYLDEIHQKEFIAWLMNT

SEQ ID NO: 1008 - protein, 29 aa, Artificial sequence
  Synthetic polypeptide
  MISC_FEATURE: Analog 66
HSQGTFTSDYSKYLDEIHQKEFIAWLLAQ

SEQ ID NO: 1009 - protein, 29 aa, Artificial sequence
  Synthetic polypeptide
  MISC_FEATURE: Analog 68
HSQGTFTSDYSKYLDKIHQEEFIAWLMNT

SEQ ID NO: 1010 - protein, 29 aa, Artificial sequence
  Synthetic polypeptide
  MISC_FEATURE: Analog 69
  MISC_FEATURE (16)..(20): Lactam bridge between residues 16 and 20
HSQGTFTSDYSKYLDKIHQEEFIAWLMNT

SEQ ID NO: 1011 - protein, 29 aa, Artificial sequence
  Synthetic polypeptide
  MISC_FEATURE: Analog 84
  MISC_FEATURE (16)..(20): Lactam bridge between residues 16 and 20
HSQGTFTSDYSIYLDEIHQKEFICWLLAQ

SEQ ID NO: 1012 - protein, 29 aa, Artificial sequence
  Synthetic polypeptide
  MISC_FEATURE: Analog 85
  MISC_FEATURE (16)..(20): Lactam bridge between residues 16 and 20
  MISC_FEATURE (24)..(24): PEG (20kDa) covalently attached to Cysteine
HSQGTFTSDYSIYLDEIHQKEFICWLLAQ

SEQ ID NO: 1013 - protein, 29 aa, Artificial sequence
  Synthetic polypeptide
  MISC_FEATURE: Analog 92
HSQGTFTSDYSIYLDEKHQKEFIAWLLAQ

SEQ ID NO: 1014 - protein, 29 aa, Artificial sequence
  Synthetic polypeptide
  MISC_FEATURE: Analog 93
  MISC_FEATURE (16)..(20): Lactam bridge between residues 16 and 20
  MISC_FEATURE (17)..(21): Lactam bridge between residues 17 and 21
HSQGTFTSDYSIYLDEKHQKEFIAWLLAQ

SEQ ID NO: 1015 - protein, 29 aa, Artificial sequence
  Synthetic polypeptide
  MISC_FEATURE: Analog 95
  MISC_FEATURE (16)..(20): Lactam bridge between residues 16 and 20
HAEGTFISDYSIAMDEIHQKDFVNWLLAQ

SEQ ID NO: 1016 - protein, 29 aa, Artificial sequence
  Synthetic polypeptide
  MISC_FEATURE: Analog 96
  MISC_FEATURE (16)..(20): Lactam bridge between residues 16 and 20
YAEGTFISDYSIAMDEIHQKDFVNWLLAQ

SEQ ID NO: 1017 - protein, 29 aa, Artificial sequence
  Synthetic polypeptide
  MISC_FEATURE: Analog 97
  MISC_FEATURE (16)..(20): Lactam bridge between residues 16 and 20
HAEGTFTSDYSIYMDEIHQKDFVNWLLAQ

SEQ ID NO: 1018 - protein, 29 aa, Artificial sequence
  Synthetic polypeptide
  MISC_FEATURE: Analog 98
  MISC_FEATURE (16)..(20): Lactam bridge between residues 16 and 20
YAEGTFTSDYSIYMDEIHQKDFVNWLLAQ

SEQ ID NO: 1019 - protein, 42 aa, Artificial sequence
  Synthetic polypeptide
  MISC_FEATURE: Analog 99
YAEGTFISDYSIAMDKIHQQDFVNWLLAQKGKKNWLKHNITQ

SEQ ID NO: 1020 - protein, 42 aa, Artificial sequence
  Synthetic polypeptide
  MISC_FEATURE: Analog 100
  MOD_RES (2)..(2): Xaa is Aib
YXEGTFISDYSIAMDKIHQQDFVNWLLAQKGKKNWLKHNITQ

SEQ ID NO: 1021 - protein, 42 aa, Artificial sequence
  Synthetic polypeptide
  MISC_FEATURE: Analog 101
YAPGTFISDYSIAMDKIHQQDFVNWLLAQKGKKNWLKHNITQ

SEQ ID NO: 1022 - protein, 42 aa, Artificial sequence
  Synthetic polypeptide
  MISC_FEATURE: Analog 102
  MOD_RES (2)..(2): Xaa is Aib
YXEGTFISDYSIAMDKIHQQDFVCWLLAQKGKKNWLKHNITQ

SEQ ID NO: 1023 - protein, 42 aa, Artificial sequence
  Synthetic polypeptide
  MISC_FEATURE: Analog 104
YAPGTFISDYSIAMDKIHQQDFVCWLLAQKGKKNWLKHNITQ

SEQ ID NO: 1024 - protein, 42 aa, Artificial sequence; identical to SEQ ID NO: 1023
  Synthetic polypeptide
  MISC_FEATURE: Analog 105
  MISC_FEATURE (24)..(24): PEG (40kDa) attached to Cysteine

SEQ ID NO: 1025 - protein, 29 aa, Artificial sequence
  Synthetic polypeptide
  MISC_FEATURE: Analog 106
YAEGTFISDYSIAMDKIHQQDFVNWLLAQ

SEQ ID NO: 1026 - protein, 29 aa, Artificial sequence
  Synthetic polypeptide
  MISC_FEATURE: Analog 107
  MISC_FEATURE (16)..(20): Lactam bridge between residues 16 and 20
HSQGTFISDYSKYLDEIHQKEFIAWLMNT

SEQ ID NO: 1027 - protein, 29 aa, Artificial sequence
  Synthetic polypeptide
  MISC_FEATURE: Analog 108
  MISC_FEATURE (16)..(20): Lactam bridge between residues 16 and 20
HSQGTFISDYSKALDEIHQKEFIAWLMNT

SEQ ID NO: 1028 - protein, 29 aa, Artificial sequence
  Synthetic polypeptide
  MISC_FEATURE: Analog 109
  MISC_FEATURE (16)..(20): Lactam bridge between residues 16 and 20
YSQGTFTSDYSKYLDEIHQKDFVNWLLAQ

SEQ ID NO: 1029 - protein, 29 aa, Artificial sequence
  Synthetic polypeptide
  MISC_FEATURE: Analog 110
  MISC_FEATURE (16)..(20): Lactam bridge between residues 16 and 20
YSQGTFTSDYSIYLDEIHQKDFVNWLLAQ

SEQ ID NO: 1030 - protein, 29 aa, Artificial sequence
  Synthetic polypeptide
  MISC_FEATURE: Analog 111
  MISC_FEATURE (16)..(20): Lactam bridge between residues 16 and 20
HSQGTFTSDYSKYLDEIHQKDFVNWLLAQ

SEQ ID NO: 1031 - protein, 24 aa, Artificial sequence
  Synthetic polypeptide
  MISC_FEATURE: Analog 113
  MOD_RES (1)..(1): Xaa is 3-phenyllactic acid
  MISC_FEATURE (11)..(15): Lactam bridge between residues 11 and 15
XISDYSIAMDEIHQKDFVNWLLAQ

SEQ ID NO: 1032 - protein, 24 aa, Artificial sequence
  Synthetic polypeptide
  MISC_FEATURE: Analog 114
  MOD_RES (1)..(1): Xaa is 3-phenyllactic acid
  MISC_FEATURE (11)..(15): Lactam bridge between residues 11 and 15
XTSDYSKYLDEIHQKDFVNWLLAQ

SEQ ID NO: 1033 - protein, 39 aa, Artificial sequence
  Synthetic polypeptide
  MISC_FEATURE: Analog 115
  MISC_FEATURE (16)..(20): Lactam bridge between residues 16 and 20
HSQGTFTSDYSKYLDEIHQKDFVNWLLAGGPSSGAPPPS

SEQ ID NO: 1034 - protein, 39 aa, Artificial sequence
  Synthetic polypeptide
  MISC_FEATURE: Analog 116
  MISC_FEATURE (16)..(20): Lactam bridge between residues 16 and 20
YSQGTFTSDYSKYLDEIHQKDFVNWLLAGGPSSGAPPPS

SEQ ID NO: 1035 - protein, 29 aa, Artificial sequence
  Synthetic polypeptide
  MISC_FEATURE: Analog 118
  MISC_FEATURE (16)..(20): Lactam bridge between residues 16 and 20
YSQGTFTSDYSKYLDEIHQKEFVNWLLAQ

SEQ ID NO: 1036 - protein, 39 aa, Artificial sequence
  Synthetic polypeptide
  MISC_FEATURE: Analog 120
  MISC_FEATURE (16)..(20): Lactam bridge between residues 16 and 20
YSQGTFTSDYSKYLDEQAAKEFIAWLMNGGPSSGAPPPS

SEQ ID NO: 1037 - protein, 29 aa, Artificial sequence
  Synthetic polypeptide
  MISC_FEATURE: Analog 124
  MISC_FEATURE (16)..(20): Lactam bridge between residues 16 and 20
HSQGTFTSDYSIYMDEIHQKDFVNWLLAQ

SEQ ID NO: 1038 - protein, 29 aa, Artificial sequence
  Synthetic polypeptide
  MISC_FEATURE: Analog 125
  MISC_FEATURE (16)..(20): Lactam bridge between residues 16 and 20
YSQGTFTSDYSIYMDEIHQKDFVNWLLAQ

SEQ ID NO: 1039 - protein, 39 aa, Artificial sequence
  Synthetic polypeptide
  MISC_FEATURE: Analog 127
  MISC_FEATURE (16)..(20): Lactam bridge between residues 16 and 20
YSQGTFTSDYSKYLDEQAAKEFVNWLLAGGPSSGAPPPS

SEQ ID NO: 1040 - protein, 39 aa, Artificial sequence
  Synthetic polypeptide
  MISC_FEATURE: Analog 128
  MISC_FEATURE (16)..(20): Lactam bridge between residues 16 and 20
HSQGTFTSDYSKYLDEIHQKDFIAWLMNGGPSSGAPPPS

SEQ ID NO: 1041 - protein, 39 aa, Artificial sequence
  Synthetic polypeptide
  MISC_FEATURE: Analog 129
  MISC_FEATURE (16)..(20): Lactam bridge between residues 16 and 20
YSQGTFTSDYSKYLDEIHQKDFIAWLMNGGPSSGAPPPS

SEQ ID NO: 1042 - protein, 39 aa, Artificial sequence
  Synthetic polypeptide
  MISC_FEATURE: Analog 139
  MISC_FEATURE (16)..(20): Lactam bridge between residues 16 and 20
YSQGTFTSDYSKYLDEQAAKEFIAWLLAGGPSSGAPPPS

SEQ ID NO: 1043 - protein, 39 aa, Artificial sequence
  Synthetic polypeptide
  MISC_FEATURE: Analog 140
  MISC_FEATURE (16)..(20): Lactam bridge between residues 16 and 20
YSQGTFTSDYSIYLDEQAAKEFVNWLLAGGPSSGAPPPS

SEQ ID NO: 1044 - protein, 39 aa, Artificial sequence
  Synthetic polypeptide
  MISC_FEATURE: Analog 141
  MISC_FEATURE (16)..(20): Lactam bridge between residuess 16 and 20
YSQGTFTSDYSKYMDEQAAKEFVNWLLAGGPSSGAPPPS

SEQ ID NO: 1045 - protein, 39 aa, Artificial sequence
  Synthetic polypeptide
  MISC_FEATURE: Analog 142
  MISC_FEATURE (16)..(20): Lactam bridge between residues 16 and 20
YAEGTFTSDYSIYMDEQAAKEFVNWLLAGGPSSGAPPPS

SEQ ID NO: 1046 - protein, 39 aa, Artificial sequence
  Synthetic polypeptide
  MISC_FEATURE: Analog 143
  MISC_FEATURE (16)..(20): Lactam bridge between residues 16 and 20
YSQGTFTSDYSKYLDERRAKEFVNWLLAGGPSSGAPPPS

SEQ ID NO: 1047 - protein, 39 aa, Artificial sequence
  Synthetic polypeptide
  MISC_FEATURE: Analog 144
  MISC_FEATURE (16)..(20): Lactam bridge between residues 16 and 20
YAQGTFTSDYSIYMDEQAAKEFVNWLLAGGPSSGAPPPS

SEQ ID NO: 1048 - protein, 39 aa, Artificial sequence
  Synthetic polypeptide
  MISC_FEATURE: Analog 145
  MISC_FEATURE (16)..(20): Lactam bridge between residues 16 and 20
YAQGTFISDYSKYLDEQAAKEFVNWLLAGGPSSGAPPPS

SEQ ID NO: 1049 - protein, 39 aa, Artificial sequence; identical to SEQ ID NO: 1048
  Synthetic polypeptide
  MISC_FEATURE: Analog 146
  MISC_FEATURE (16)..(20): Lactam bridge between residues 16 and 20

SEQ ID NO: 1050 - protein, 39 aa, Artificial sequence
  Synthetic polypeptide
  MISC_FEATURE: Analog 147
  MISC_FEATURE (16)..(20): Lactam bridge between residues 16 and 20
YSQGTFTSDYSIYLDEQAAKEFIAWLLAGGPSSGAPPPS

SEQ ID NO: 1051 - protein, 39 aa, Artificial sequence
  Synthetic polypeptide
  MISC_FEATURE: Analog 148
  MISC_FEATURE (16)..(20): Lactam bridge between residues 16 and 20
YSEGTFTSDYSIYLDEQAAKEFIAWLLAGGPSSGAPPPS

SEQ ID NO: 1052 - protein, 39 aa, Artificial sequence
  Synthetic polypeptide
  MISC_FEATURE: Analog 149
  MISC_FEATURE (16)..(20): Lactam bridge between residues 16 and 20
YAEGTFTSDYSIYLDEQAAKEFVNWLLAGGPSSGAPPPS

SEQ ID NO: 1053 - protein, 39 aa, Artificial sequence
  Synthetic polypeptide
  MISC_FEATURE: Analog 150
  MISC_FEATURE (16)..(20): Lactam bridge between residues 16 and 20
YSQGTFISDYSIYLDEQAAKEFVNWLLAGGPSSGAPPPS

SEQ ID NO: 1054 - protein, 39 aa, Artificial sequence; identical to SEQ ID NO: 1042
  Synthetic polypeptide
  MISC_FEATURE: Analog 151
  MISC_FEATURE (16)..(20): Lactam bridge between residues 16 and 20

SEQ ID NO: 1055 - protein, 39 aa, Artificial sequence
  Synthetic polypeptide
  MISC_FEATURE: Analog 152
  MOD_RES (2)..(2): Xaa is Aib
  MISC_FEATURE (16)..(20): Lactam bridge between residues 16 and 20
YXQGTFTSDYSIYLDEQAAKEFVNWLLAGGPSSGAPPPS

SEQ ID NO: 1056 - protein, 39 aa, Artificial sequence
  Synthetic polypeptide
  MISC_FEATURE: Analog 154
  MOD_RES (1)..(1): Xaa is hippuric acid
  MISC_FEATURE (16)..(20): Lactam bridge between residues 16 and 20
XSQGTFTSDYSIYLDEQAAKEFVNWLLAGGPSSGAPPPS

SEQ ID NO: 1057 - protein, 39 aa, Artificial sequence; identical to SEQ ID NO: 1039
  Synthetic polypeptide
  MISC_FEATURE: Analog 155
  MISC_FEATURE (12)..(16): Lactam bridge between residues 12 and 16

SEQ ID NO: 1058 - protein, 39 aa, Artificial sequence
  Synthetic polypeptide
  MISC_FEATURE: Analog 156
  MISC_FEATURE (20)..(24): Lactam bridge between residues 20 and 24
YSQGTFTSDYSIYLDEQAAKEFVEWLLAGGPSSGAPPPS

SEQ ID NO: 1059 - protein, 39 aa, Artificial sequence
  Synthetic polypeptide
  MISC_FEATURE: Analog 157
  MISC_FEATURE (24)..(28): Lactam bridge between residues 24 and 28
YSQGTFTSDYSIYLDEQAAKEFVEWLLKGGPSSGAPPPS

SEQ ID NO: 1060 - protein, 39 aa, Artificial sequence
  Synthetic polypeptide
  MISC_FEATURE: Analog 158
  MOD_RES (2)..(2): Xaa is Aib
  MISC_FEATURE (16)..(20): Lactam bridge between residues 16 and 20
YXQGTFTSDYSIYLDEQAAKEFVCWLLAGGPSSGAPPPS

SEQ ID NO: 1061 - protein, 39 aa, Artificial sequence
  Synthetic polypeptide
  MISC_FEATURE: Analog 162
  MOD_RES (2)..(2): Xaa is Aib
  MISC_FEATURE (16)..(20): Lactam bridge between residues 16 and 20
YXQGTFTSDYSYYLDEQAVKEFVNWLIAGGPSSGAPPPS

SEQ ID NO: 1062 - protein, 29 aa, Artificial sequence
  Synthetic polypeptide
  MISC_FEATURE: Analog 163
  MISC_FEATURE (16)..(20): Lactam bridge between residues 16 and 20
YSQGTFTSDYSIYLDEQAAKEFVNWLLAG

SEQ ID NO: 1063 - protein, 29 aa, Artificial sequence
  Synthetic polypeptide
  MISC_FEATURE: Analog 164
  MOD_RES (2)..(2): Xaa is Aib
  MISC_FEATURE (16)..(20): Lactam bridge between residues 16 and 20
YXQGTFTSDYSIYLDEQAAKEFVNWLLAG

SEQ ID NO: 1064 - protein, 40 aa, Artificial sequence
  Synthetic polypeptide
  MISC_FEATURE: Analog 165
  MOD_RES (2)..(2): Xaa is Aib
  MISC_FEATURE (16)..(20): Lactam bridge between residues 16 and 20
YXQGTFTSDYSIYLDEQAAKEFVNWLLAGGPSSGAPPPSC

SEQ ID NO: 1065 - protein, 40 aa, Artificial sequence; identical to SEQ ID NO: 1064
  Synthetic polypeptide
  MISC_FEATURE: Analog 166
  MOD_RES (2)..(2): Xaa is d-alanine
  MISC_FEATURE (16)..(20): Lactam bridge between residues 16 and 20

SEQ ID NO: 1066 - protein, 39 aa, Artificial sequence
  Synthetic polypeptide
  MISC_FEATURE: Analog 167
  MISC_FEATURE (17)..(20): Lactam bridge between residues 17 and 20
YSQGTFTSDYSIYLDEEAAKEFVNWLLAGGPSSGAPPPS

SEQ ID NO: 1067 - protein, 39 aa, Artificial sequence
  Synthetic polypeptide
  MISC_FEATURE: Analog 168
  MISC_FEATURE (18)..(21): Lactam bridge between residues 18 and 21
YSQGTFTSDYSIYLDEQKAKEFVNWLLAGGPSSGAPPPS

SEQ ID NO: 1068 - protein, 29 aa, Artificial sequence
  Synthetic polypeptide
  MISC_FEATURE: Analog 169
  MOD_RES (2)..(2): Xaa is Aib
  MISC_FEATURE (16)..(20): Lactam bridge between residues 16 and 20
YXQGTFTSDYSIYLDEQAAKEFVCWLLAG

SEQ ID NO: 1069 - protein, 40 aa, Artificial sequence; identical to SEQ ID NO: 1064
  Synthetic polypeptide
  MISC_FEATURE: Analog 170
  MOD_RES (2)..(2): Xaa is Aib
  MISC_FEATURE (16)..(20): Lactam bridge between residues 16 and 20
  MISC_FEATURE (40)..(40): PEG (40kDa) covalently attached to Cysteine

SEQ ID NO: 1070 - protein, 29 aa, Artificial sequence
  Synthetic polypeptide
  MISC_FEATURE: Analog 172
  MOD_RES (2)..(2): Xaa is Aib
  MISC_FEATURE (16)..(20): Lactam bridge between residues 16 and 20
  MISC_FEATURE (24)..(24): PEG (40kDa) covalently attached to Cysteine
YXQGTFTSDYSIYLDEQAAKEFVCWLLAG

SEQ ID NO: 1071 - protein, 40 aa, Artificial sequence
  Synthetic polypeptide
  MISC_FEATURE: Analog 174
  MOD_RES (2)..(2): Xaa is Aib
  MISC_FEATURE (16)..(20): Lactam bridge between residues 16 and 20
YXEGTFTSDYSIYLDEQAAKEFVNWLLAGGPSSGAPPPSC

SEQ ID NO: 1072 - protein, 39 aa, Artificial sequence; identical to SEQ ID NO: 1060
  Synthetic polypeptide
  MISC_FEATURE: Analog 175
  MOD_RES (2)..(2): Xaa is Aib
  MISC_FEATURE (16)..(20): Lactam bridge between residues 16 and 20
  MISC_FEATURE (24)..(24): PEG (40kDa) covalently attached to Cysteine

SEQ ID NO: 1073 - protein, 40 aa, Artificial sequence
  Synthetic polypeptide
  MISC_FEATURE: Analog 176
  MOD_RES (2)..(2): Xaa is Aib
  MISC_FEATURE (16)..(20): Lactam bridge between residues 16 and 20
YXQGTFISDYSIYLDEQAAKEFVNWLLAGGPSSGAPPPSC

SEQ ID NO: 1074 - protein, 29 aa, Artificial sequence
  Synthetic polypeptide
  MISC_FEATURE: Analog 177
  MOD_RES (2)..(2): Xaa is Aib
  MISC_FEATURE (16)..(20): Lactam bridge between residues 16 and 20
YXQGTFISDYSIYLDEQAAKEFVCWLLAG

SEQ ID NO: 1075 - protein, 40 aa, Artificial sequence; identical to SEQ ID NO: 1071
  Synthetic polypeptide
  MISC_FEATURE: Analog 178
  MOD_RES (2)..(2): Xaa is Aib
  MISC_FEATURE (16)..(20): Lactam bridge between residues 16 and 20
  MISC_FEATURE (40)..(40): PEG (40kDa) covalently attached to Cysteine

SEQ ID NO: 1076 - protein, 29 aa, Artificial sequence
  Synthetic polypeptide
  MISC_FEATURE: Analog 179
  MOD_RES (2)..(2): Xaa is Aib
  MISC_FEATURE (16)..(20): Lactam bridge between residues 16 and 20
  MISC_FEATURE (24)..(24): PEG (40kDa) covalently attached to Cysteine
YXQGTFISDYSIYLDEQAAKEFVCWLLAG

SEQ ID NO: 1077 - protein, 40 aa, Artificial sequence; identical to SEQ ID NO: 1073
  Synthetic polypeptide
  MISC_FEATURE: Analog 182
  MOD_RES (2)..(2): Xaa is Aib
  MISC_FEATURE (16)..(20): Lactam bridge between residues 16 and 20
  MISC_FEATURE (40)..(40): PEG (40kDa) covalently attached to Cysteine

SEQ ID NO: 1078 - protein, 29 aa, Artificial sequence
  Synthetic polypeptide
  MISC_FEATURE: Analog 186
  MOD_RES (2)..(2): Xaa is Aib
  MISC_FEATURE (16)..(20): Lactam bridge between residues 16 and 20
  MISC_FEATURE (24)..(24): PEG (40kDa) covalently attached to Cysteine
YXQGTFTSDYSIYLDEQAAKEFVCWLMNG

SEQ ID NO: 1079 - protein, 39 aa, Artificial sequence; identical to SEQ ID NO: 1055
  Synthetic polypeptide
  MISC_FEATURE: Analog 191
  MOD_RES (2)..(2): Xaa is Aib

SEQ ID NO: 1080 - protein, 34 aa, Artificial sequence
  Synthetic polypeptide
  MISC_FEATURE: Analog 192
FTSDYSIYLDEQAAKEFVNWLLAGGPSSGAPPPS

SEQ ID NO: 1081 - protein, 38 aa, Artificial sequence
  Synthetic polypeptide
  MISC_FEATURE: Analog 194
  MOD_RES (1)..(1): Xaa is Aib
XQGTFTSDYSIYLDEEAVRLFVNWLLAGGPSSGAPPPS

SEQ ID NO: 1082 - protein, 26 aa, Artificial sequence
  Synthetic polypeptide
  MISC_FEATURE: Analog 197
  MISC_FEATURE (13)..(17): Lactam bridge between residues 13 and 17
GTFTSDYSIYLDEQAAKEFVNWLLAG

SEQ ID NO: 1083 - protein, 28 aa, Artificial sequence
  Synthetic polypeptide
  MISC_FEATURE: Analog 198
  MOD_RES (1)..(1): Xaa is Aib
  MISC_FEATURE (15)..(19): Lactam bridge between residues 15 and 19
XQGTFTSDYSIYLDEQAAKEFVNWLLAG

SEQ ID NO: 1084 - protein, 40 aa, Artificial sequence
  Synthetic polypeptide
  MISC_FEATURE: Analog 199
  MOD_RES (2)..(2): Xaa is Aib
  MISC_FEATURE (16)..(20): Lactam bridge between residues 16 and 20
YXQGTFVSDYSIYLDEQAAKEFVNWLLAGGPSSGAPPPSC

SEQ ID NO: 1085 - protein, 40 aa, Artificial sequence
  Synthetic polypeptide
  MISC_FEATURE: Analog 200
  MOD_RES (2)..(2): Xaa is Aib
  MISC_FEATURE (16)..(20): Lactam bridge between residues 16 and 20
  MOD_RES (27)..(27): Xaa is Nle
YXQGTFTSDYSIYLDEQAAKEFVNWLXAGGPSSGAPPPSC

SEQ ID NO: 1086 - protein, 39 aa, Artificial sequence
  Synthetic polypeptide
  MISC_FEATURE: Analog 201
  MOD_RES (2)..(2): Xaa is Aib
YXQGTFTSDYSIYLDEEAVRLFVNWLLAGGPSSGAPPPS

SEQ ID NO: 1087 - protein, 40 aa, Artificial sequence; identical to SEQ ID NO: 1084
  Synthetic polypeptide
  MISC_FEATURE: Analog 202
  MOD_RES (2)..(2): Xaa is Aib
  MISC_FEATURE (16)..(20): Lactam bridge between residues 16 and 20
  MISC_FEATURE (40)..(40): PEG (40kDa) covalently attached to Cysteine

SEQ ID NO: 1088 - protein, 40 aa, Artificial sequence; identical to SEQ ID NO: 1085
  Synthetic polypeptide
  MISC_FEATURE: Analog 203
  MOD_RES (2)..(2): Xaa is Aib
  MISC_FEATURE (16)..(20): Lactam bridge between residues 16 and 20
  MOD_RES (27)..(27): Xaa is Nle
  MISC_FEATURE (40)..(40): PEG (40kDa) covalently attached to Cysteine

SEQ ID NO: 1089 - protein, 40 aa, Artificial sequence
  Synthetic polypeptide
  MISC_FEATURE: Analog 204
  MOD_RES (2)..(2): Xaa is Aib
  MISC_FEATURE (16)..(20): Lactam bridge between residues 16 and 20
YXEGTFTSDYSIYLDEQAAKEFVNWLLAGRPSSGAPPPSC

SEQ ID NO: 1090 - protein, 40 aa, Artificial sequence; identical to SEQ ID NO: 1089
  Synthetic polypeptide
  MISC_FEATURE: Analog 205
  MOD_RES (2)..(2): Xaa is Aib
  MISC_FEATURE (16)..(20): Lactam bridge between residues 16 and 20
  MISC_FEATURE (40)..(40): PEG (40kDa) covalently attached to Cysteine

SEQ ID NO: 1091 - protein, 43 aa, Artificial sequence
  Synthetic polypeptide
  MISC_FEATURE: Analog 206
  MOD_RES (2)..(2): Xaa is Aib
  MISC_FEATURE (16)..(20): Lactam bridge between residues 16 and 20
YXEGTFTSDYSIYLDEQAAKEFVNWLLAGKGKKNWLKHNITQC

SEQ ID NO: 1092 - protein, 43 aa, Artificial sequence
  Synthetic polypeptide
  MISC_FEATURE: Analog 207
  MOD_RES (2)..(2): Xaa is Aib
  MISC_FEATURE (16)..(20): Lactam bridge between residues 16 and 20
YXQGTFTSDYSIYLDEQAAKEFVNWLLAGKGKKNWLKHNITQC

SEQ ID NO: 1093 - protein, 43 aa, Artificial sequence; identical to SEQ ID NO: 1091
  Synthetic polypeptide
  MISC_FEATURE: Analog 208
  MOD_RES (2)..(2): Xaa is Aib
  MISC_FEATURE (16)..(20): Lactam bridge between residues 16 and 20
  MISC_FEATURE (43)..(43): PEG (40kDa) covalently attached to Cysteine

SEQ ID NO: 1094 - protein, 40 aa, Artificial sequence
  Synthetic polypeptide
  MISC_FEATURE: Analog 209
  MOD_RES (2)..(2): Xaa is Aib
  MISC_FEATURE (9)..(12): Lactam bridge between residues 9 and 12
  MISC_FEATURE (16)..(20): Lactam bridge between residues 16 and 20
YXQGTFTSEYSKYLDEQAAKEFVNWLLAGGPSSGAPPPSC

SEQ ID NO: 1095 - protein, 10 aa, Artificial sequence
  Synthetic polypeptide
  MISC_FEATURE: CEX
GPSSGAPPPS

SEQ ID NO: 1096 - protein, 11 aa, Artificial sequence
  Synthetic polypeptide
  MISC_FEATURE (1)..(1): Xaa is any amino acid
XGPSSGAPPPS

SEQ ID NO: 1097 - protein, 8 aa, Artificial sequence
  Synthetic polypeptide
KRNRNNIA

SEQ ID NO: 1098 - protein, 4 aa, Artificial sequence
  Synthetic polypeptide
KRNR

SEQ ID NO: 1099 - protein, 40 aa, Artificial Sequence
  Synthetic polypeptide
  MOD_RES (2)..(2): Xaa is Aib
  MOD_RES (20)..(20): Xaa is Aib
  MISC_FEATURE (40)..(40): PEG (40kDa) covalently attached to Cysteine
  MISC_FEATURE (40)..(40): C-terminal amidation
YXEGTFTSDYSIYLDKQAAXEFVNWLLAGGPSSGAPPPSC

SEQ ID NO: 1100 - protein, 40 aa, Artificial Sequence
  Synthetic polypeptide
  MOD_RES (2)..(2): Xaa is Aib
  MOD_RES (20)..(20): Xaa is Aib
  MISC_FEATURE (24)..(24): PEG (40kDa) covalently attached to Cysteine
  MISC_FEATURE (40)..(40): C-terminal amidation
YXEGTFTSDYSIYLDKQAAXEFVCWLLAGGPSSGAPPPSK

SEQ ID NO: 1101 - protein, 40 aa, Artificial Sequence; identical to SEQ ID NO: 1100
  Synthetic polypeptide
  MOD_RES (2)..(2): Xaa is Aib
  MOD_RES (20)..(20): Xaa is Aib
  MISC_FEATURE (24)..(24): PEG (40kDa) covalently attached to Cysteine
  MISC_FEATURE (40)..(40): 16 Carbon fatty acyl group covalently attached to Lysine
  MISC_FEATURE (40)..(40): C-terminal amidation

SEQ ID NO: 1102 - protein, 40 aa, Artificial Sequence; identical to SEQ ID NO: 1100
  Synthetic polypeptide
  MOD_RES (2)..(2): Xaa is Aib
  MOD_RES (20)..(20): Xaa is Aib
  MISC_FEATURE (24)..(24): PEG (40kDa) covalently attached to Cysteine
  MISC_FEATURE (40)..(40): 14 Carbon fatty acyl group covalently attached Lysine
  MISC_FEATURE (40)..(40): C-terminal amidation

SEQ ID NO: 1103 - protein, 40 aa, Artificial Sequence; identical to SEQ ID NO: 1100
  Synthetic polypeptide
  MOD_RES (2)..(2): Xaa is Aib
  MOD_RES (20)..(20): Xaa is Aib
  MISC_FEATURE (24)..(24): PEG (40kDa) covalently attached to Cysteine
  MISC_FEATURE (40)..(40): 18 Carbon fatty acyl group covalently attached to Lysine
  MISC_FEATURE (40)..(40): C-terminal amidation

SEQ ID NO: 1104 - protein, 40 aa, Artificial Sequence
  Synthetic polypeptide
  MOD_RES (2)..(2): Xaa is Aib
  MOD_RES (20)..(20): Xaa is Aib
  MISC_FEATURE (40)..(40): 14 Carbon fatty acyl group covalently attached to Lysine
  MISC_FEATURE (40)..(40): C-terminal amidation
YXEGTFTSDYSIYLDKQAAXEFVNWLLAGGPSSGAPPPSK

SEQ ID NO: 1105 - protein, 40 aa, Artificial Sequence; identical to SEQ ID NO: 1104
  Synthetic polypeptide
  MOD_RES (2)..(2): Xaa is Aib
  MOD_RES (20)..(20): Xaa is Aib
  MISC_FEATURE (40)..(40): 16 Carbon fatty acyl group covalently attached Lysine
  MISC_FEATURE (40)..(40): C-terminal amidation

SEQ ID NO: 1106 - protein, 40 aa, Artificial Sequence; identical to SEQ ID NO: 1104
  Synthetic polypeptide
  MOD_RES (2)..(2): Xaa is Aib
  MOD_RES (20)..(20): Xaa is Aib
  MISC_FEATURE (40)..(40): 18 Carbon fatty acyl group covalently attached to Lysine
  MISC_FEATURE (40)..(40): C-terminal amidation

SEQ ID NO: 1107 - protein, 40 aa, Artificial Sequence
  Synthetic polypeptide
  MOD_RES (2)..(2): Xaa is Aib
  MOD_RES (20)..(20): Xaa is Aib
  MISC_FEATURE (40)..(40): C-terminal amidation
YXQGTFTSDYSIYLDKQAAXEFVNWLLAGGPSSGAPPPSC

SEQ ID NO: 1108 - protein, 40 aa, Artificial Sequence; identical to SEQ ID NO: 1107
  Synthetic polypeptide
  MOD_RES (2)..(2): Xaa is Aib
  MOD_RES (20)..(20): Xaa is Aib
  MISC_FEATURE (40)..(40): PEG (40kDa) attached to Cysteine
  MISC_FEATURE (40)..(40): C-terminal amidation

SEQ ID NO: 1109 - protein, 40 aa, Artificial Sequence; identical to SEQ ID NO: 1099
  Synthetic polypeptide
  MOD_RES (2)..(2): Xaa is Aib
  MOD_RES (20)..(20): Xaa is Aib
  MISC_FEATURE (40)..(40): C-terminal amidation

SEQ ID NO: 1110 - protein, 29 aa, Artificial Sequence
  Synthetic polypeptide
  MOD_RES (2)..(2): Xaa is Aib
  MOD_RES (20)..(20): Xaa is Aib
  MISC_FEATURE (29)..(29): C-terminal amidation
YXQGTFTSDYSIYLDKQAAXEFVCWLLAG

SEQ ID NO: 1111 - protein, 40 aa, Artificial Sequence; identical to SEQ ID NO: 1104
  Synthetic polypeptide
  MOD_RES (2)..(2): Xaa is Aib
  MOD_RES (20)..(20): Xaa is Aib
  MISC_FEATURE (40)..(40): C-terminal amidation

SEQ ID NO: 1112 - protein, 29 aa, Artificial Sequence
  Synthetic polypeptide
  MISC_FEATURE (2)..(2): Xaa is Aib
  MISC_FEATURE (20)..(20): Xaa is Aib
YXQGTFTSDYSIYLDKQAAXEFVNWLLAG

SEQ ID NO: 1113 - protein, 39 aa, Artificial Sequence
  Synthetic polypeptide
  MOD_RES (2)..(2): Xaa is Aib
  MOD_RES (20)..(20): Xaa is Aib
  MISC_FEATURE (24)..(24): 14 Carbon fatty acyl group covalently attached to Lysine
  MISC_FEATURE (39)..(39): C-terminal amidation
YXEGTFTSDYSIYLDKQAAXEFVKWLLAGGPSSGAPPPS

SEQ ID NO: 1114 - protein, 39 aa, Artificial Sequence; identical to SEQ ID NO: 1113
  Synthetic polypeptide
  MOD_RES (2)..(2): Xaa is Aib
  MOD_RES (20)..(20): Xaa is Aib
  MISC_FEATURE (24)..(24): 16 Carbon fatty acyl group covalently attached to Lysine
  MISC_FEATURE (39)..(39): C-terminal amidation

SEQ ID NO: 1115 - protein, 39 aa, Artificial Sequence; identical to SEQ ID NO: 1113
  Synthetic polypeptide
  MOD_RES (2)..(2): Xaa is Aib
  MOD_RES (20)..(20): Xaa is Aib
  MISC_FEATURE (24)..(24): 18 Carbon fatty acyl group covalently attached to Lysine
  MISC_FEATURE (39)..(39): C-terminal amidation

SEQ ID NO: 1116 - protein, 39 aa, Artificial Sequence; identical to SEQ ID NO: 1113
  Synthetic polypeptide
  MOD_RES (2)..(2): Xaa is Aib
  MOD_RES (20)..(20): Xaa is Aib
  MISC_FEATURE (39)..(39): C-terminal amidation

SEQ ID NO: 1117 - protein, 39 aa, Artificial Sequence
  Synthetic polypeptide
  MOD_RES (2)..(2): Xaa is Aib
  MISC_FEATURE (10)..(10): 14 Carbon fatty acyl group covalently attached to Lysine
  MOD_RES (20)..(20): Xaa is Aib
  MISC_FEATURE (39)..(39): C-terminal amidation
YXEGTFTSDKSIYLDKQAAXEFVNWLLAGGPSSGAPPPS

SEQ ID NO: 1118 - protein, 39 aa, Artificial Sequence; identical to SEQ ID NO: 1117
  Synthetic polypeptide
  MOD_RES (2)..(2): Xaa is Aib
  MISC_FEATURE (10)..(10): 16 Carbon fatty acyl group covalently attached to Lysine
  MOD_RES (20)..(20): Xaa is Aib
  MISC_FEATURE (39)..(39): C-terminal amidation

SEQ ID NO: 1119 - protein, 39 aa, Artificial Sequence; identical to SEQ ID NO: 1117
  Synthetic polypeptide
  MOD_RES (2)..(2): Xaa is Aib
  MISC_FEATURE (10)..(10): 18 Carbon fatty acyl group covalently attached to Lysine
  MOD_RES (20)..(20): Xaa is Aib
  MISC_FEATURE (39)..(39): C-terminal amidation

SEQ ID NO: 1120 - protein, 39 aa, Artificial Sequence; identical to SEQ ID NO: 1117
  Synthetic polypeptide
  MOD_RES (2)..(2): Xaa is Aib
  MOD_RES (20)..(20): Xaa is Aib
  MISC_FEATURE (39)..(39): C-terminal amidation

SEQ ID NO: 1121 - protein, 40 aa, Artificial Sequence
  Synthetic polypeptide
  MOD_RES (2)..(2): Xaa is Aib
  MOD_RES (16)..(16): Xaa is Orn
  MOD_RES (20)..(20): Xaa is Aib
  MISC_FEATURE (40)..(40): C-terminal amidation
YXQGTFTSDYSIYLDXQAAXEFVNWLLAGGPSSGAPPPSC

SEQ ID NO: 1122 - protein, 40 aa, Artificial Sequence; identical to SEQ ID NO: 1121
  Synthetic polypeptide
  MOD_RES (2)..(2): Xaa is Aib
  MOD_RES (16)..(16): Xaa is 2,4-diaminobutyric acid
  MOD_RES (20)..(20): Xaa is Aib
  MISC_FEATURE (40)..(40): C-terminal amidation

SEQ ID NO: 1123 - protein, 40 aa, Artificial Sequence
  Synthetic polypeptide
  MOD_RES (2)..(2): Xaa is Aib
  MOD_RES (20)..(20): Xaa is Aib
  MISC_FEATURE (40)..(40): 14 Carbon fatty acyl group covalentaly attached to Lysine
  MISC_FEATURE (40)..(40): C-terminal amidation
YXQGTFTSDYSIYLDKQAAXEFVNWLLAGGPSSGAPPPSK

SEQ ID NO: 1124 - protein, 40 aa, Artificial Sequence; identical to SEQ ID NO: 1123
  Synthetic polypeptide
  MOD_RES (2)..(2): Xaa is Aib
  MOD_RES (20)..(20): Xaa is Aib
  MISC_FEATURE (40)..(40): 16 Carbon fatty acyl group covalently attached to Lysine
  MISC_FEATURE (40)..(40): C-terminal amidation

SEQ ID NO: 1125 - protein, 40 aa, Artificial Sequence; identical to SEQ ID NO: 1123
  Synthetic polypeptide
  MOD_RES (2)..(2): Xaa is Aib
  MOD_RES (20)..(20): Xaa is Aib
  MISC_FEATURE (40)..(40): 18 Carbon fatty acyl group covalently attached to Lysine
  MISC_FEATURE (40)..(40): C-terminal amidation

SEQ ID NO: 1126 - protein, 40 aa, Artificial Sequence; identical to SEQ ID NO: 1123
  Synthetic polypeptide
  MOD_RES (2)..(2): Xaa is Aib
  MOD_RES (20)..(20): Xaa is Aib
  MISC_FEATURE (40)..(40): C-terminal amidation

SEQ ID NO: 1127 - protein, 29 aa, Artificial Sequence
  Synthetic polypeptide
  MOD_RES (2)..(2): Xaa is Aib
  MOD_RES (20)..(20): Xaa is Aib
  MISC_FEATURE (24)..(24): PEG (40kDa) covalently attached to Cysteine
  MISC_FEATURE (29)..(29): C-terminal amidation
YXQGTFTSDYSIYLDKQAAXEFVCWLLAG

SEQ ID NO: 1128 - protein, 29 aa, Artificial Sequence
  Synthetic polypeptide
  MOD_RES (2)..(2): Xaa is Aib
  MISC_FEATURE (10)..(10): 14 Carbon fatty acyl group covalently attached to Lysine
  MOD_RES (20)..(20): Xaa is Aib
  MISC_FEATURE (29)..(29): C-terminal amidation
YXEGTFTSDKSIYLDKQAAXEFVNWLLAG

SEQ ID NO: 1129 - protein, 29 aa, Artificial Sequence
  Synthetic polypeptide
  MOD_RES (2)..(2): Xaa is Aib
  MISC_FEATURE (10)..(10): 16 Carbon fatty acyl group covalently attached to Lysine
  MOD_RES (20)..(20): Xaa is Aib
  MISC_FEATURE (29)..(29): C-terminal amidation
YXEGTFTSDKSIYLDKQAAXEFVNWLLAG

SEQ ID NO: 1130 - protein, 29 aa, Artificial Sequence
  Synthetic polypeptide
  MOD_RES (2)..(2): Xaa is Aib
  MISC_FEATURE (10)..(10): 18 Carbon fatty acyl group covalently attached to Lysine
  MOD_RES (20)..(20): Xaa is Aib
  MISC_FEATURE (29)..(29): C-terminal amidation
YXEGTFTSDKSIYLDKQAAXEFVNWLLAG

SEQ ID NO: 1131 - protein, 29 aa, Artificial Sequence
  Synthetic polypeptide
  MOD_RES (2)..(2): Xaa is Aib
  MOD_RES (20)..(20): Xaa is Aib
  MISC_FEATURE (29)..(29): C-terminal amidation
YXEGTFTSDKSIYLDKQAAXEFVNWLLAG

SEQ ID NO: 1132 - protein, 40 aa, Artificial Sequence
  Synthetic polypeptide
  MOD_RES (2)..(2): Xaa is Aib
  MOD_RES (20)..(20): Xaa is Aib
  MISC_FEATURE (40)..(40): 14 Carbon fatty acyl group covalently attached to Lysine
  MISC_FEATURE (40)..(40): C-terminal amidation
YXQGTFTSDYSIYLDKQAAXEFVCWLLAGGPSSGAPPPSK

SEQ ID NO: 1133 - protein, 40 aa, Artificial Sequence; identical to SEQ ID NO: 1132
  Synthetic polypeptide
  MOD_RES (2)..(2): Xaa is Aib
  MOD_RES (20)..(20): Xaa is Aib
  MISC_FEATURE (40)..(40): 16 Carbon fatty acyl group covalently attached to Lysine
  MISC_FEATURE (40)..(40): C-terminal amidation

SEQ ID NO: 1134 - protein, 40 aa, Artificial Sequence; identical to SEQ ID NO: 1132
  Synthetic polypeptide
  MOD_RES (2)..(2): Xaa is Aib
  MOD_RES (20)..(20): Xaa is Aib
  MISC_FEATURE (40)..(40): 18 Carbon fatty acyl group covalently attached to Lysine
  MISC_FEATURE (40)..(40): C-terminal amidation

SEQ ID NO: 1135 - protein, 40 aa, Artificial Sequence; identical to SEQ ID NO: 1132
  Synthetic polypeptide
  MOD_RES (2)..(2): Xaa is Aib
  MOD_RES (20)..(20): Xaa is Aib
  MISC_FEATURE (40)..(40): C-terminal amidation

SEQ ID NO: 1136 - protein, 40 aa, Artificial Sequence; identical to SEQ ID NO: 1132
  Synthetic polypeptide
  MOD_RES (2)..(2): Xaa is Aib
  MOD_RES (20)..(20): Xaa is Aib
  MISC_FEATURE (24)..(24): PEG (40kDa) covalently attached to Cysteine
  MISC_FEATURE (40)..(40): 14 Carbon fatty acyl group covalently attached to Lysine
  MISC_FEATURE (40)..(40): C-terminal amidation

SEQ ID NO: 1137 - protein, 40 aa, Artificial Sequence; identical to SEQ ID NO: 1132
  Synthetic polypeptide
  MOD_RES (2)..(2): Xaa is Aib
  MOD_RES (20)..(20): Xaa is Aib
  MISC_FEATURE (24)..(24): PEG (40kDa) covalently attached to Cysteine
  MISC_FEATURE (40)..(40): 16 Carbon fatty acyl group covalently attached to Lysine
  MISC_FEATURE (40)..(40): C-terminal amidation

SEQ ID NO: 1138 - protein, 40 aa, Artificial Sequence; identical to SEQ ID NO: 1132
  Synthetic polypeptide
  MOD_RES (2)..(2): Xaa is Aib
  MOD_RES (20)..(20): Xaa is Aib
  MISC_FEATURE (24)..(24): PEG (40kDa) covalently attached to Cysteine
  MISC_FEATURE (40)..(40): 18 Carbon fatty acyl group covalently attached to Lysine
  MISC_FEATURE (40)..(40): C-terminal amidation

SEQ ID NO: 1139 - protein, 40 aa, Artificial Sequence; identical to SEQ ID NO: 1132
  Synthetic polypeptide
  MOD_RES (2)..(2): Xaa is Aib
  MOD_RES (20)..(20): Xaa is Aib
  MISC_FEATURE (24)..(24): PEG (40kDa) covalently attached to Cysteine
  MISC_FEATURE (40)..(40): C-terminal amidation

SEQ ID NO: 1140 - protein, 40 aa, Artificial Sequence; identical to SEQ ID NO: 1099
  Synthetic polypeptide
  MOD_RES (2)..(2): Xaa is Aib
  MOD_RES (20)..(20): Xaa is Aib
  MISC_FEATURE (40)..(40): PEG (40kDa) covalently attached to Cysteine
  MISC_FEATURE (40)..(40): C-terminal amidation

SEQ ID NO: 1141 - protein, 40 aa, Artificial Sequence; identical to SEQ ID NO: 1100
  Synthetic polypeptide
  MOD_RES (2)..(2): Xaa is Aib
  MOD_RES (20)..(20): Xaa is Aib
  MISC_FEATURE (40)..(40): 16 Carbon fatty acyl group covalently attached to Lysine
  MISC_FEATURE (40)..(40): C-terminal amidation

SEQ ID NO: 1142 - protein, 40 aa, Artificial Sequence
  Synthetic polypeptide
  MOD_RES (2)..(2): Xaa is Aib
  MOD_RES (20)..(20): Xaa is Aib
  MISC_FEATURE (40)..(40): 16 Carbon fatty acyl group covalently attached to Lysine
  MISC_FEATURE (40)..(40): C-terminal amidation
YXQGTFTSDYSIYLDKQAAXEFVCWLMNGGPSSGAPPPSK

SEQ ID NO: 1143 - protein, 40 aa, Artificial Sequence; identical to SEQ ID NO: 1142
  Synthetic polypeptide
  MOD_RES (2)..(2): Xaa is Aib
  MOD_RES (20)..(20): Xaa is Aib
  MISC_FEATURE (24)..(24): PEG (40kDa) covalently attached to Cysteine
  MISC_FEATURE (40)..(40): 16 Carbon fatty acyl group covalently attached to Lysine
  MISC_FEATURE (40)..(40): C-terminal amidation

SEQ ID NO: 1144 - protein, 40 aa, Artificial Sequence; identical to SEQ ID NO: 1100
  Synthetic polypeptide
  MOD_RES (2)..(2): Xaa is Aib
  MOD_RES (20)..(20): Xaa is Aib
  MISC_FEATURE (40)..(40): 14 Carbon fatty acyl group covalently attached to Lysine
  MISC_FEATURE (40)..(40): C-terminal amidation

SEQ ID NO: 1145 - protein, 40 aa, Artificial Sequence; identical to SEQ ID NO: 1100
  Synthetic polypeptide
  MOD_RES (2)..(2): Xaa is Aib
  MOD_RES (20)..(20): Xaa is Aib
  MISC_FEATURE (40)..(40): 18 Carbon fatty acyl group covalently attached to Lysine
  MISC_FEATURE (40)..(40): C-terminal amidation

SEQ ID NO: 1146 - protein, 40 aa, Artificial Sequence; identical to SEQ ID NO: 1100
  Synthetic polypeptide
  MOD_RES (2)..(2): Xaa is Aib
  MOD_RES (20)..(20): Xaa is Aib
  MISC_FEATURE (40)..(40): C-terminal amidation

SEQ ID NO: 1147 - protein, 40 aa, Artificial Sequence; identical to SEQ ID NO: 1104
  Synthetic polypeptide
  MOD_RES (2)..(2): Xaa is Aib
  MOD_RES (20)..(20): Xaa is Aib
  MISC_FEATURE (40)..(40): 3-SH-propionic acyl group covalently attached to Lysine
  MISC_FEATURE (40)..(40): C-terminal amidation

SEQ ID NO: 1148 - protein, 40 aa, Artificial Sequence; identical to SEQ ID NO: 1123
  Synthetic polypeptide
  MOD_RES (2)..(2): Xaa is Aib
  MOD_RES (20)..(20): Xaa is Aib
  MISC_FEATURE (40)..(40): 8 Carbon fatty acyl group covalently attached to Lysine
  MISC_FEATURE (40)..(40): C-terminal amidation

SEQ ID NO: 1149 - protein, 40 aa, Artificial Sequence
  Synthetic polypeptide
  MOD_RES (2)..(2): Xaa is Aib
  MOD_RES (20)..(20): Xaa is Aib
  MISC_FEATURE (40)..(40): C-terminal amidation
YXQGTFSSDYSIYLDKQAAXEFVNWLLAGGPSSGAPPPSC

SEQ ID NO: 1150 - protein, 40 aa, Artificial Sequence
  Synthetic polypeptide
  MOD_RES (2)..(2): Xaa is Aib
  MOD_RES (7)..(7): Xaa is 2-aminobutyric acid
  MOD_RES (20)..(20): Xaa is Aib
  MISC_FEATURE (40)..(40): C-terminal amidation
YXQGTFXSDYSIYLDKQAAXEFVNWLLAGGPSSGAPPPSC

SEQ ID NO: 1151 - protein, 40 aa, Artificial Sequence; identical to SEQ ID NO: 1132
  Synthetic polypeptide
  MOD_RES (2)..(2): Xaa is Aib
  MOD_RES (20)..(20): Xaa is Aib
  MISC_FEATURE (40)..(40): 8 Carbon fatty acyl group covalently attached to Lysine
  MISC_FEATURE (40)..(40): C-terminal amidation

SEQ ID NO: 1152 - protein, 40 aa, Artificial Sequence; identical to SEQ ID NO: 1100
  Synthetic polypeptide
  MOD_RES (2)..(2): Xaa is Aib
  MOD_RES (20)..(20): Xaa is Aib
  MISC_FEATURE (40)..(40): 8 Carbon fatty acyl group covalently attached to Lysine
  MISC_FEATURE (40)..(40): C-terminal amidation

SEQ ID NO: 1153 - protein, 40 aa, Artificial Sequence; identical to SEQ ID NO: 1100
  Synthetic polypeptide
  MOD_RES (2)..(2): Xaa is Aib
  MOD_RES (20)..(20): Xaa is Aib
  MISC_FEATURE (24)..(24): PEG (40kDa) covalently attached to Cysteine
  MISC_FEATURE (40)..(40): C-terminal amidation

SEQ ID NO: 1154 - protein, 40 aa, Artificial Sequence
  Synthetic polypeptide
  MOD_RES (2)..(2): Xaa is Aib
  MOD_RES (20)..(20): Xaa is Aib
  MOD_RES (40)..(40): Xaa is d-Lysine
  MISC_FEATURE (40)..(40): 14 Carbon fatty acyl group covalently attached to d-Lysine
  MISC_FEATURE (40)..(40): C-terminal amidation
YXEGTFTSDYSIYLDKQAAXEFVCWLLAGGPSSGAPPPSX

SEQ ID NO: 1155 - protein, 40 aa, Artificial Sequence; identical to SEQ ID NO: 1154
  Synthetic polypeptide
  MOD_RES (2)..(2): Xaa is Aib
  MOD_RES (20)..(20): Xaa is Aib
  MOD_RES (40)..(40): Xaa is d-Lysine
  MISC_FEATURE (40)..(40): C-terminal amidation

SEQ ID NO: 1156 - protein, 40 aa, Artificial Sequence; identical to SEQ ID NO: 1154
  Synthetic polypeptide
  MOD_RES (2)..(2): Xaa is Aib
  MOD_RES (20)..(20): Xaa is Aib
  MISC_FEATURE (24)..(24): PEG (40kDa) covalently attached to Cysteine
  MOD_RES (40)..(40): Xaa is d-Lysine
  MISC_FEATURE (40)..(40): 14 Carbon fatty acyl group covalently attached to Lysine
  MISC_FEATURE (40)..(40): C-terminal amidation

SEQ ID NO: 1157 - protein, 40 aa, Artificial Sequence; identical to SEQ ID NO: 1154
  Synthetic polypeptide
  MOD_RES (2)..(2): Xaa is Aib
  MOD_RES (20)..(20): Xaa is Aib
  MISC_FEATURE (24)..(24): PEG (40kDa) covalently attached to Cysteine
  MISC_FEATURE (40)..(40): Xaa is d-Lysine
  MISC_FEATURE (40)..(40): C-terminal amidation

SEQ ID NO: 1158 - protein, 39 aa, Artificial Sequence
  Synthetic polypeptide
  MOD_RES (2)..(2): Xaa is Aib
  MISC_FEATURE (10)..(10): 14 Carbon fatty acyl group covalently attached to Lysine
  MOD_RES (20)..(20): Xaa is Aib
  MISC_FEATURE (40)..(40): C-terminal amidation
YXEGTFTSDKSIYLDKQAAXEFVCWLLAGGPSSGAPPPS

SEQ ID NO: 1159 - protein, 39 aa, Artificial Sequence; identical to SEQ ID NO: 1158
  Synthetic polypeptide
  MOD_RES (2)..(2): Xaa is Aib
  MOD_RES (20)..(20): Xaa is Aib
  MISC_FEATURE (40)..(40): C-terminal amidation

SEQ ID NO: 1160 - protein, 41 aa, Artificial Sequence
  Synthetic polypeptide
  MOD_RES (2)..(2): Xaa is Aib
  MOD_RES (20)..(20): Xaa is Aib
  MISC_FEATURE (40)..(40): 14 Carbon fatty acyl group covalently attached to Lysine
  MISC_FEATURE (41)..(41): C-terminal amidation
YXEGTFTSDYSIYLDKQAAXEFVNWLLAGGPSSGAPPPSKC

SEQ ID NO: 1161 - protein, 41 aa, Artificial Sequence; identical to SEQ ID NO: 1160
  Synthetic polypeptide
  MOD_RES (2)..(2): Xaa is Aib
  MOD_RES (20)..(20): Xaa is Aib
  MISC_FEATURE (41)..(41): C-terminal amidation

SEQ ID NO: 1162 - protein, 39 aa, Artificial Sequence; identical to SEQ ID NO: 1158
  Synthetic polypeptide
  MOD_RES (2)..(2): Xaa is Aib
  MISC_FEATURE (10)..(10): 14 Carbon fatty acyl group covalently attached to Lysine
  MOD_RES (20)..(20): Xaa is Aib
  MISC_FEATURE (24)..(24): PEG (40kDa) covalently attached to Cysteine
  MISC_FEATURE (39)..(39): C-terminal amidation

SEQ ID NO: 1163 - protein, 41 aa, Artificial Sequence; identical to SEQ ID NO: 1160
  Synthetic polypeptide
  MOD_RES (2)..(2): Xaa is Aib
  MOD_RES (20)..(20): Xaa is Aib
  MISC_FEATURE (40)..(40): 14 Carbon fatty acyl group covalently attached to Lysine
  MISC_FEATURE (41)..(41): PEG (40kDa) covalently attached to Cysteine
  MISC_FEATURE (41)..(41): C-terminal amidation

SEQ ID NO: 1164 - protein, 41 aa, Artificial Sequence; identical to SEQ ID NO: 1160
  Synthetic polypeptide
  MOD_RES (2)..(2): Xaa is Aib
  MOD_RES (20)..(20): Xaa is Aib
  MISC_FEATURE (41)..(41): PEG (40kDa) covalently attached to Cysteine
  MISC_FEATURE (41)..(41): C-terminal amidation

SEQ ID NO: 1165 - protein, 40 aa, Artificial Sequence
  Synthetic polypeptide
  MOD_RES (2)..(2): Xaa is Aib
  MISC_FEATURE (40)..(40): 14 Carbon fatty acyl group covalently attached to Lysine
  MISC_FEATURE (40)..(40): C-terminal amidation
HXQGTFTSDYSKYLDEQAAKEFICWLMNGGPSSGAPPPSK

SEQ ID NO: 1166 - protein, 40 aa, Artificial Sequence; identical to SEQ ID NO: 1100
  Synthetic polypeptide
  MOD_RES (2)..(2): Xaa is Aib
  MOD_RES (20)..(20): Xaa is Aib
  MISC_FEATURE (24)..(24): PEG (40kDa) covalently attached to Cysteine
  MISC_FEATURE (40)..(40): 14 Carbon fatty acyl group covalently attached to Lysine
  MISC_FEATURE (40)..(40): C-terminal amidation

SEQ ID NO: 1167 - protein, 40 aa, Artificial Sequence
  Synthetic polypeptide
  MOD_RES (2)..(2): Xaa is Aib
  MOD_RES (16)..(16): Xaa is Aib
  MISC_FEATURE (40)..(40): C-terminal amidation
YXQGTFTSDYSIYLDXQAAKEFVNWLLAGGPSSGAPPPSC

SEQ ID NO: 1168 - protein, 40 aa, Artificial Sequence
  Synthetic polypeptide
  MOD_RES (2)..(2): Xaa is Aib
  MOD_RES (16)..(16): Xaa is Aib
  MISC_FEATURE (40)..(40): C-terminal amidation
YXQGTFTSDYSIYLDXQAAQEFVNWLLAGGPSSGAPPPSC

SEQ ID NO: 1169 - protein, 40 aa, Artificial Sequence
  Synthetic polypeptide
  MOD_RES (2)..(2): Xaa is Aib
  MOD_RES (12)..(16): Lactam bridge between residues 12 and 16
  MOD_RES (20)..(20): Xaa is Aib
  MOD_RES (40)..(40): C-terminal amidation
YXQGTFTSDYSKYLDEQAAXEFVNWLLAGGPSSGAPPPSC

SEQ ID NO: 1170 - protein, 10 aa, Artificial Sequence
  Synthetic polypeptide
GPSSGAPPPK

SEQ ID NO: 1171 - protein, 11 aa, Artificial Sequence
  Synthetic polypeptide
  MOD_RES (1)..(1): Xaa is Gly or a small, aliphatic or non-polar or slightly polar amino acid
XGPSSGAPPPK

SEQ ID NO: 1172 - protein, 12 aa, Artificial Sequence
  Synthetic  polypeptide
  MOD_RES (1)..(1): Xaa is Gly or a small, aliphatic or non-polar or slightly polar amino acid
XGPSSGAPPPSK

SEQ ID NO: 1173 - protein, 40 aa, Artificial Sequence; identical to SEQ ID NO: 1167
  Synethic polypeptide
  MOD_RES (2)..(2): Xaa is Aib
  MOD_RES (16)..(16): Xaa is Aib
  MISC_FEATURE (40)..(40): PEG (40kDa) covalently attached to Cysteine
  MISC_FEATURE (40)..(40): C-terminal amidation

SEQ ID NO: 1174 - protein, 40 aa, Artificial Sequence; identical to SEQ ID NO: 1168
  Synthetic polypeptide
  MOD_RES (2)..(2): Xaa is Aib
  MOD_RES (16)..(16): Xaa is Aib
  MISC_FEATURE (40)..(40): PEG (40kDa) covalently attached to Cysteine
  MISC_FEATURE (40)..(40): C-terminal amidation

SEQ ID NO: 1175 - protein, 40 aa, Artificial Sequence; identical to SEQ ID NO: 1121
  Synthetic polypeptide
  MOD_RES (2)..(2): Xaa is Aib
  MOD_RES (16)..(16): Xaa is Aib
  MOD_RES (20)..(20): Xaa is Aib
  MISC_FEATURE (40)..(40): C-terminal amidation

SEQ ID NO: 1176 - protein, 40 aa, Artificial Sequence
  Synthetic polypeptide
  MOD_RES (2)..(2): Xaa is Aib
  MOD_RES (20)..(20): Xaa is Aib
  MISC_FEATURE (40)..(40): C-terminal amidation
YXQGTFTSDYSIYLDEQAAXEFVNWLLAGGPSSGAPPPSC

SEQ ID NO: 1177 - protein, 29 aa, Artificial Sequence
  Synthetic polypeptide
  MOD_RES (2)..(2): Xaa is Aib
  MOD_RES (20)..(20): Xaa is Aib
  MISC_FEATURE (29)..(29): C-terminal amidation
YXQGTFTSDYSIYLDEQAAXEFVCWLLAG

SEQ ID NO: 1178 - protein, 29 aa, Artificial Sequence
  Synthetic polypeptide
  MISC_FEATURE: C-terminal amidation
  MOD_RES (2)..(2): Xaa is Aib
  MOD_RES (20)..(20): Xaa is Aib
YXQGTFTSDYSIYLDSQAAXEFVCWLLAG

SEQ ID NO: 1179 - protein, 30 aa, Artificial Sequence
  Synthetic polypeptide
  MOD_RES (2)..(2): Xaa is Aib
  MISC_FEATURE (24)..(24): PEG (40kDa) covalently attached to Cysteine
HXEGTFTSDVSSYLEEQAAKEFICWLVKGR

SEQ ID NO: 1180 - protein, 42 aa, Artificial Sequence
  Synthetic polypeptide
  MISC_FEATURE (24)..(24): Substituted amino acid covalently linked to hydrophilic group
YAPGTFISDYSIAMDKIHQQDFVXWLLAQKGKKNWLKHNITQ

SEQ ID NO: 1181 - protein, 40 aa, Artificial Sequence
  Synthetic polypeptide
  MOD_RES (2)..(2): Xaa is Aib
  MISC_FEATURE (16)..(20): Lactam bridge between residues 16 and 20
  MISC_FEATURE (40)..(40): Substituted amino acid covalentaly linked to hydrophilic group
YXQGTFTSDYSIYLDEQAAKEFVNWLLAGGPSSGAPPPSX

SEQ ID NO: 1182 - protein, 29 aa, Artificial Sequence
  Synthetic polypeptide
  MOD_RES (2)..(2): Xaa is Aib
  MISC_FEATURE (16)..(20): Lactam bridge between residues 16 and 20
  MISC_FEATURE (24)..(24): Substituted amino acid covalently linked to hydrophilic group
  misc_feature (29)..(29): Xaa can be any naturally occurring amino acid
YXQGTFTSDYSIYLDEQAAKEFVXWLLAX

SEQ ID NO: 1183 - protein, 39 aa, Artificial Sequence
  Synthetic polypeptide
  MOD_RES (2)..(2): Xaa is Aib
  MISC_FEATURE (16)..(20): Lactam bridge between residues 16 and 20
  MISC_FEATURE (24)..(24): Substituted amino acid covalently linked to hydrophilic group
YXQGTFTSDYSIYLDEQAAKEFVXWLLAGGPSSGAPPPS

SEQ ID NO: 1184 - protein, 40 aa, Artificial Sequence
  Synthetic polypeptide
  MOD_RES (2)..(2): Xaa is Aib
  MISC_FEATURE (16)..(20): Lactam bridge between residues 16 and 20
  MISC_FEATURE (40)..(40): Substituted amino acid covalently linked to hydrophilic group
YXEGTFTSDYSIYLDEQAAKEFVNWLLAGGPSSGAPPPSX

SEQ ID NO: 1185 - protein, 29 aa, Artificial Sequence
  Sythetic polypeptide
  MOD_RES (2)..(2): Xaa is Aib
  MISC_FEATURE (16)..(20): Lactam bridge between residues 16 and 20
  MISC_FEATURE (24)..(24): Substituted amino acid covalently linked to hydrophilic group
YXQGTFISDYSIYLDEQAAKEFVXWLLAG

SEQ ID NO: 1186 - protein, 40 aa, Artificial Sequence
  Synthetic polypeptide
  MOD_RES (2)..(2): Xaa is Aib
  MISC_FEATURE (16)..(20): Lactam bridge between residues 16 and 20
  MISC_FEATURE (40)..(40): Substituted amino acid covalently linked to hydrophilic group
YXQGTFISDYSIYLDEQAAKEFVNWLLAGGPSSGAPPPSX

SEQ ID NO: 1187 - protein, 29 aa, Artificial sequence
  Synthetic polypeptide
  MOD_RES (2)..(2): Xaa is Aib
  MISC_FEATURE (16)..(20): Lactam bridge between residues 16 and 20
  MISC_FEATURE (24)..(24): Substituted amino acid covalently linked to hydrophilic group
YXQGTFTSDYSIYLDEQAAKEFVXWLMNG

SEQ ID NO: 1188 - protein, 40 aa, Artificial sequence
  Synthetic polypeptide
  MOD_RES (2)..(2): Xaa is Aib
  MISC_FEATURE (16)..(20): Lactam bridge between residues 16 and 20
  MISC_FEATURE (40)..(40): Substitute amino acid covalently linked to hydrophilic group
YXQGTFVSDYSIYLDEQAAKEFVNWLLAGGPSSGAPPPSX

SEQ ID NO: 1189 - protein, 40 aa, Artificial sequence
  Synthetic polypeptide
  MOD_RES (2)..(2): Xaa is Aib
  MISC_FEATURE (16)..(20): Lactam bridge between residues 16 and 20
  MOD_RES (27)..(27): Xaa is Nle
  MISC_FEATURE (40)..(40): Substituted amino acid covalently linked to hydrophilic group
YXQGTFTSDYSIYLDEQAAKEFVNWLXAGGPSSGAPPPSX

SEQ ID NO: 1190 - protein, 40 aa, Artificial sequence
  Synthetic polypeptide
  MOD_RES (2)..(2): Xaa is Aib
  MISC_FEATURE (16)..(20): Lactam bridge between residues 16 and 20
  MISC_FEATURE (40)..(40): Substituted amino acid covalently linked to hydrophilic group
YXEGTFTSDYSIYLDEQAAKEFVNWLLAGRPSSGAPPPSX

SEQ ID NO: 1191 - protein, 43 aa, Artificial sequence
  Synthetic polypeptide
  MOD_RES (2)..(2): Xaa is Aib
  MISC_FEATURE (16)..(20): Lactam bridge between residues 16 and 20
  MISC_FEATURE (43)..(43): Substituted amino acid covalently linked to hydrophilic group
YXEGTFTSDYSIYLDEQAAKEFVNWLLAGKGKKNWLKHNITQX

SEQ ID NO: 1192 - protein, 40 aa, Artificial Sequence
  Synthetic polypeptide
  MOD_RES (2)..(2): Xaa is Aib
  MOD_RES (20)..(20): Xaa is Aib
  MISC_FEATURE (40)..(40): Substituted amino acid covalently linked to hydrophilic group
  MISC_FEATURE (40)..(40): C-terminal amidation
YXEGTFTSDYSIYLDKQAAXEFVNWLLAGGPSSGAPPPSX

SEQ ID NO: 1193 - protein, 40 aa, Artificial Sequence
  Synthetic polypeptide
  MOD_RES (2)..(2): Xaa is Aib
  MOD_RES (20)..(20): Xaa is Aib
  MISC_FEATURE (24)..(24): Substituted amino acid covalently linked to hydrophilic group
  MISC_FEATURE (40)..(40): C-terminal amidation
YXEGTFTSDYSIYLDKQAAXEFVXWLLAGGPSSGAPPPSK

SEQ ID NO: 1194 - protein, 40 aa, Artificial Sequence
  Synthetic polypeptide
  MOD_RES (2)..(2): Xaa is Aib
  MOD_RES (20)..(20): Xaa is Aib
  MISC_FEATURE (24)..(24): Substituted amino acid covalently linked to hydrophilic group
  MISC_FEATURE (40)..(40): Substitute amino acid covalently linked to an acyl or alkyl group
  MISC_FEATURE (40)..(40): C-terminal amidation
YXEGTFTSDYSIYLDKQAAXEFVXWLLAGGPSSGAPPPSX

SEQ ID NO: 1195 - protein, 40 aa, Artificial Sequence; identical to SEQ ID NO: 1192
  Synthetic polypeptide
  MOD_RES (2)..(2): Xaa is Aib
  MOD_RES (20)..(20): Xaa is Aib
  MISC_FEATURE (40)..(40): Substituted amino acid covalently linked to an acyl or alkyl group
  MISC_FEATURE (40)..(40): C-terminal amidation

SEQ ID NO: 1196 - protein, 40 aa, Artificial Sequence
  Synthetic polypeptide
  MOD_RES (2)..(2): Xaa is Aib
  MOD_RES (20)..(20): Xaa is Aib
  MISC_FEATURE (40)..(40): Substituted amino acid covalently linked to hydrophilic group
  MISC_FEATURE (40)..(40): C-terminal amidation
YXQGTFTSDYSIYLDKQAAXEFVNWLLAGGPSSGAPPPSX

SEQ ID NO: 1197 - protein, 39 aa, Artificial Sequence
  Synthetic polypeptide
  MOD_RES (2)..(2): Xaa is Aib
  MOD_RES (20)..(20): Xaa is Aib
  MISC_FEATURE (24)..(24): Substituted amino acid covalently linked to acyl or alkyl group
  MISC_FEATURE (39)..(39): C-terminal amidation
YXEGTFTSDYSIYLDKQAAXEFVXWLLAGGPSSGAPPPS

SEQ ID NO: 1198 - protein, 39 aa, Artificial Sequence
  Synthetic polypeptide
  MOD_RES (2)..(2): Xaa is Aib
  MISC_FEATURE (10)..(10): Substituted amino acid covalently linked to acyl or alkyl group
  MOD_RES (20)..(20): Xaa is Aib
  MISC_FEATURE (39)..(39): C-terminal amidation
YXEGTFTSDXSIYLDKQAAXEFVNWLLAGGPSSGAPPPS

SEQ ID NO: 1199 - protein, 40 aa, Artificial Sequence; identical to SEQ ID NO: 1196
  Synthetic polypeptide
  MOD_RES (2)..(2): Xaa is Aib
  MOD_RES (20)..(20): Xaa is Aib
  MISC_FEATURE (40)..(40): Substituted amino acid covalently linked to acyl or alkyl group
  MISC_FEATURE (40)..(40): C-terminal amidation

SEQ ID NO: 1200 - protein, 29 aa, Artificial Sequence
  Synthetic polypeptide
  MOD_RES (2)..(2): Xaa is Aib
  MOD_RES (20)..(20): Xaa is Aib
  MISC_FEATURE (24)..(24): Substituted amino acid covalently linked to hydrophilic group
  MISC_FEATURE (29)..(29): C-terminal amidation
YXQGTFTSDYSIYLDKQAAXEFVXWLLAG

SEQ ID NO: 1201 - protein, 29 aa, Artificial Sequence
  Synthetic polypeptide
  MOD_RES (2)..(2): Xaa is Aib
  MISC_FEATURE (10)..(10): Substituted amino acid covalently linked to acyl or alkyl group
  MOD_RES (20)..(20): Xaa is Aib
  MISC_FEATURE (29)..(29): C-terminal amidation
YXEGTFTSDXSIYLDKQAAXEFVNWLLAG

SEQ ID NO: 1202 - protein, 40 aa, Artificial Sequence
  Synthetic polypeptide
  MOD_RES (2)..(2): Xaa is Aib
  MOD_RES (20)..(20): Xaa is Aib
  MISC_FEATURE (40)..(40): Substituted amino acid covalently linked acyl or alkyl group
  MISC_FEATURE (40)..(40): C-terminal amidation
YXQGTFTSDYSIYLDKQAAXEFVCWLLAGGPSSGAPPPSX

SEQ ID NO: 1203 - protein, 40 aa, Artificial Sequence
  Synthetic polypeptide
  MOD_RES (2)..(2): Xaa is Aib
  MOD_RES (20)..(20): Xaa is Aib
  MISC_FEATURE (24)..(24): Substituted amino acid covalently linked to hydrophilic group
  MISC_FEATURE (40)..(40): Substituted amino acid covalently linked to acyl or alkyl group
  MISC_FEATURE (40)..(40): C-terminal amidation
YXQGTFTSDYSIYLDKQAAXEFVXWLLAGGPSSGAPPPSX

SEQ ID NO: 1204 - protein, 40 aa, Artificial Sequence
  Synthetic polypeptide
  MOD_RES (2)..(2): Xaa is Aib
  MOD_RES (20)..(20): Xaa is Aib
  MISC_FEATURE (24)..(24): Substituted amino acid covalently linked to hydrophilic group
  MISC_FEATURE (40)..(40): C-terminal amidation
YXQGTFTSDYSIYLDKQAAXEFVXWLLAGGPSSGAPPPSK

SEQ ID NO: 1205 - protein, 40 aa, Artificial Sequence; identical to SEQ ID NO: 1192
  Synthetic polypeptide
  MOD_RES (2)..(2): Xaa is Aib
  MOD_RES (20)..(20): Xaa is Aib
  MISC_FEATURE (40)..(40): Substituted amino acid covalently linked to hydrophilic group
  MISC_FEATURE (40)..(40): C-terminal amidation

SEQ ID NO: 1206 - protein, 40 aa, Artificial Sequence; identical to SEQ ID NO: 1154
  Synthetic polypeptide
  MOD_RES (2)..(2): Xaa is Aib
  MOD_RES (20)..(20): Xaa is Aib
  MISC_FEATURE (40)..(40): Substituted amino acid covalently linked to acyl or alkyl group
  MISC_FEATURE (40)..(40): C-terminal amidation

SEQ ID NO: 1207 - protein, 40 aa, Artificial Sequence
  Synthetic polypeptide
  MOD_RES (2)..(2): Xaa is Aib
  MOD_RES (20)..(20): Xaa is Aib
  MISC_FEATURE (40)..(40): Substituted amino acid covalently linked to acyl or alkyl group
  MISC_FEATURE (40)..(40): C-terminal amidation
YXQGTFTSDYSIYLDKQAAXEFVCWLMNGGPSSGAPPPSX

SEQ ID NO: 1208 - protein, 40 aa, Artificial Sequence
  Synthetic polypeptide
  MOD_RES (2)..(2): Xaa is Aib
  MOD_RES (20)..(20): Xaa is Aib
  MISC_FEATURE (24)..(24): Substituted amino acid covalently linked to hydrophilic group
  MISC_FEATURE (40)..(40): Substituted amino acid covalently linked to acyl or alkyl group
  MISC_FEATURE (40)..(40): C-terminal amidation
YXQGTFTSDYSIYLDKQAAXEFVXWLMNGGPSSGAPPPSX

SEQ ID NO: 1209 - protein, 40 aa, Artificial Sequence; identical to SEQ ID NO: 1154
  Synthetic polypeptide
  MOD_RES (2)..(2): Xaa is Aib
  MOD_RES (20)..(20): Xaa is Aib
  MISC_FEATURE (40)..(40): Substituted amino acid covalently linked to acyl or alkyl group
  MISC_FEATURE (40)..(40): C-terminal amidation

SEQ ID NO: 1210 - protein, 40 aa, Artificial Sequence; identical to SEQ ID NO: 1196
  Synthetic polypeptide
  MOD_RES (2)..(2): Xaa is Aib
  MOD_RES (20)..(20): Xaa is Aib
  MISC_FEATURE (40)..(40): Substituted amino acid covalently linked to acyl or alkyl group
  MISC_FEATURE (40)..(40): C-terminal amidation

SEQ ID NO: 1211 - protein, 40 aa, Artificial Sequence; identical to SEQ ID NO: 1202
  Synthetic polypeptide
  MOD_RES (2)..(2): Xaa is Aib
  MOD_RES (20)..(20): Xaa is Aib
  MISC_FEATURE (40)..(40): Substituted amino acid covalently linked to acyl or alkyl group
  MISC_FEATURE (40)..(40): C-terminal amidation

SEQ ID NO: 1212 - protein, 40 aa, Artificial Sequence; identical to SEQ ID NO: 1154
  Synthetic polypeptide
  MOD_RES (2)..(2): Xaa is Aib
  MOD_RES (20)..(20): Xaa is Aib
  MISC_FEATURE (40)..(40): Substituted amino acid covalently linked to acyl or alkyl group
  MISC_FEATURE (40)..(40): C-terminal amidation

SEQ ID NO: 1213 - protein, 40 aa, Artificial Sequence; identical to SEQ ID NO: 1193
  Synthetic polypeptide
  MOD_RES (2)..(2): Xaa is Aib
  MOD_RES (20)..(20): Xaa is Aib
  MISC_FEATURE (24)..(24): Substituted amino acid covalently linked to hydrophilic group
  MISC_FEATURE (40)..(40): C-terminal amidation

SEQ ID NO: 1214 - protein, 40 aa, Artificial Sequence; identical to SEQ ID NO: 1154
  Synthetic polypeptide
  MOD_RES (2)..(2): Xaa is Aib
  MOD_RES (20)..(20): Xaa is Aib
  MISC_FEATURE (40)..(40): Substituted amino acid covalently linked to acyl or alkyl group
  MISC_FEATURE (40)..(40): C-terminal amidation

SEQ ID NO: 1215 - protein, 40 aa, Artificial Sequence; identical to SEQ ID NO: 1194
  Synthetic polypeptide
  MOD_RES (2)..(2): Xaa is Aib
  MOD_RES (20)..(20): Xaa is Aib
  MISC_FEATURE (24)..(24): Substituted amino acid covalently linked to hydrophilic group
  MISC_FEATURE (40)..(40): Substituted amino acid covalently linked to acyl or alkyl group
  MISC_FEATURE (40)..(40): C-terminal amidation

SEQ ID NO: 1216 - protein, 40 aa, Artificial Sequence; identical to SEQ ID NO: 1194
  Synthetic polypeptide
  MOD_RES (2)..(2): Xaa is Aib
  MOD_RES (20)..(20): Xaa is Aib
  MISC_FEATURE (24)..(24): Substituted amino acid covalently linked to hydrophilic group
  MISC_FEATURE (40)..(40): C-terminal amidation

SEQ ID NO: 1217 - protein, 39 aa, Artificial Sequence
  Synthetic polypeptide
  MOD_RES (2)..(2): Xaa is Aib
  MISC_FEATURE (10)..(10): Substituted amino acid covalently linked to acyl or alkyl group
  MOD_RES (20)..(20): Xaa is Aib
  MISC_FEATURE (40)..(40): C-terminal amidation
YXEGTFTSDXSIYLDKQAAXEFVCWLLAGGPSSGAPPPS

SEQ ID NO: 1218 - protein, 41 aa, Artificial Sequence
  Synthetic polypeptide
  MOD_RES (2)..(2): Xaa is Aib
  MOD_RES (20)..(20): Xaa is Aib
  MISC_FEATURE (40)..(40): Substituted amino acid covalently linked to acyl or alkyl group
  MISC_FEATURE (41)..(41): C-terminal amidation
YXEGTFTSDYSIYLDKQAAXEFVNWLLAGGPSSGAPPPSXC

SEQ ID NO: 1219 - protein, 39 aa, Artificial Sequence
  Synthetic polypeptide
  MOD_RES (2)..(2): Xaa is Aib
  MISC_FEATURE (10)..(10): Substituted amino acid covalently linked to acyl or alkyl group
  MOD_RES (20)..(20): Xaa is Aib
  MISC_FEATURE (24)..(24): Substituted amino acid covalently linked to hydrophilic group
  MISC_FEATURE (39)..(39): C-terminal amidation
YXEGTFTSDXSIYLDKQAAXEFVXWLLAGGPSSGAPPPS

SEQ ID NO: 1220 - protein, 41 aa, Artificial Sequence
  Synthetic polypeptide
  MOD_RES (2)..(2): Xaa is Aib
  MOD_RES (20)..(20): Xaa is Aib
  MISC_FEATURE (40)..(40): Substituted amino acid covalently linked to acyl or alkyl group
  MISC_FEATURE (41)..(41): Substituted amino acid covalently linked to hydrophilic group
  MISC_FEATURE (41)..(41): C-terminal amidation
YXEGTFTSDYSIYLDKQAAXEFVNWLLAGGPSSGAPPPSXX

SEQ ID NO: 1221 - protein, 41 aa, Artificial Sequence
  Synthetic polypeptide
  MOD_RES (2)..(2): Xaa is Aib
  MOD_RES (20)..(20): Xaa is Aib
  MISC_FEATURE (41)..(41): Substituted amino acid covalently linked to hydrophilic group
  MISC_FEATURE (41)..(41): C-terminal amidation
YXEGTFTSDYSIYLDKQAAXEFVNWLLAGGPSSGAPPPSKX

SEQ ID NO: 1222 - protein, 40 aa, Artificial Sequence
  Synthetic polypeptide
  MOD_RES (2)..(2): Xaa is Aib
  MISC_FEATURE (40)..(40): Substituted amino acid covalently linked to acyl or alkyl group
  MISC_FEATURE (40)..(40): C-terminal amidation
HXQGTFTSDYSKYLDEQAAKEFICWLMNGGPSSGAPPPSX

SEQ ID NO: 1223 - protein, 40 aa, Artificial Sequence; identical to SEQ ID NO: 1194
  Synthetic polypeptide
  MOD_RES (2)..(2): Xaa is Aib
  MOD_RES (20)..(20): Xaa is Aib
  MISC_FEATURE (24)..(24): Substituted amino acid covalently linked to hydrophilic group
  MISC_FEATURE (40)..(40): Substituted amino acid covalently linked to acyl or alkyl group
  MISC_FEATURE (40)..(40): C-terminal amidation

SEQ ID NO: 1224 - protein, 40 aa, Artificial Sequence
  Synthetic polypeptide
  MOD_RES (2)..(2): Xaa is Aib
  MOD_RES (16)..(16): Xaa is Aib
  MISC_FEATURE (40)..(40): Substituted amino acid covalently linked to hydrophilic group
  MISC_FEATURE (40)..(40): C-terminal amidation
YXQGTFTSDYSIYLDXQAAKEFVNWLLAGGPSSGAPPPSX

SEQ ID NO: 1225 - protein, 40 aa, Artificial Sequence
  Synthetic polypeptide
  MOD_RES (2)..(2): Xaa is Aib
  MOD_RES (16)..(16): Xaa is Aib
  MISC_FEATURE (40)..(40): Substituted amino acid covalently linked to hydrophilic group
  MISC_FEATURE (40)..(40): C-terminal amidation
YXQGTFTSDYSIYLDXQAAQEFVNWLLAGGPSSGAPPPSX

SEQ ID NO: 1226 - protein, 30 aa, Artificial Sequence; identical to SEQ ID NO: 1179
  Synthetic polypeptide
  MOD_RES (2)..(2): Xaa is Aib
  MISC_FEATURE (24)..(24): Substituted amino acid covalently linked to hydrophilic group

SEQ ID NO: 1227 - protein, 29 aa, Artificial Sequence
  Synthetic polypeptide
  MOD_RES (2)..(2): Xaa is Aib
  MOD_RES (20)..(20): Xaa is Aib
  MISC_FEATURE (29)..(29): C-terminal amidation
YXQGTFTSDYSIYLDKQAAXEFVNWLLAG

SEQ ID NO: 1228 - protein, 29 aa, Artificial Sequence
  Synthetic polypeptide
  MOD_RES (2)..(2): Xaa is D-Ser, D-Ala, Val, Gly, N-Methyl Ser, N-Methyl Ala, or Aib
  MOD_RES (16)..(16): Xaa is Lys, Glu, Ser, Orn, Dab, Aib or any alpha, alpha-disubstituted amino acid
  MOD_RES (20)..(20): Xaa is any alpha, alpha-disubstituted amino acid
  MOD_RES (27)..(27): Xaa is Ile, Leu, or Nle
  MOD_RES (28)..(28): Xaa is Ala or Gly
  MOD_RES (29)..(29): Xaa is Thr, Ala, or Gly
  MISC_FEATURE (29)..(29): C-terminal amidation
YXQGTFTSDYSIYLDXQAAXEFVNWLXXX

SEQ ID NO: 1229 - protein, 29 aa, Artificial Sequence
  Synthetic polypeptide
  MOD_RES (2)..(2): Xaa is Aib
  MOD_RES (20)..(20): Xaa is Aib
  MISC_FEATURE (29)..(29): C-terminal amidation
YXQGTFTSDYSKYLDKRRAXDFVQWLLAG

SEQ ID NO: 1230 - protein, 29 aa, Artificial Sequence
  Synthetic polypeptide
  MOD_RES (2)..(2): Xaa is D-Ser, DAla, Val, Gly, N-Methyl Ser, N-Methyl Ala, or Aib
  MOD_RES (16)..(16): Xaa is Lys, Glu, Ser, Orn, Dab, Aib or any alpha, alpha-disubstituted amino acid
  MOD_RES (20)..(20): Xaa is any alpha, alpha-disubstituted amino acid
  MOD_RES (27)..(27): Xaa is Ile, Leu, or Nle
  MOD_RES (28)..(28): Xaa is Ala or Gly
  MOD_RES (29)..(29): Xaa is Thr, Ala, or Gly
  MOD_RES (29)..(29): C-terminal amidation
YXQGTFTSDYSKYLDXRRAXDFVQWLXXX

SEQ ID NO: 1231 - protein, 41 aa, Artificial Sequence; identical to SEQ ID NO: 1160
  Synthetic polypeptide
  MISC_FEATURE: Homodimer
  MOD_RES (2)..(2): Xaa is Aib
  MOD_RES (20)..(20): Xaa is Aib
  MISC_FEATURE (40)..(40): 14 Carbon fatty acyl group covalently bound to Lysine
  MOD_RES (40)..(40): C-terminal amidation
  DISULFID (41)..(41): Disulfide bond formed with Cys residue of a second peptide having the same structure.

SEQ ID NO: 1232 - protein, 40 aa, Artificial Sequence
  Synthetic polypeptide
  MOD_RES (2)..(2): Xaa is Aib
  MOD_RES (20)..(20): Xaa is Aib
  MISC_FEATURE (40)..(40): C-terminal amidation
YXQGTFTSDYSIYLDKQAAXEFVNWLMNGGPSSGAPPPSK

SEQ ID NO: 1233 - protein, 40 aa, Artificial Sequence
  Synthetic polypeptide
  MOD_RES (2)..(2): Xaa is Aib
  MOD_RES (20)..(20): Xaa is Aib
  MISC_FEATURE (40)..(40): C-terminal amidation
YXQGTFISDYSIYLDKQAAXEFVNWLLAGGPSSGAPPPSK

SEQ ID NO: 1234 - protein, 40 aa, Artificial Sequence; identical to SEQ ID NO: 1233
  Synthetic polypeptide
  MOD_RES (2)..(2): Xaa is Aib
  MOD_RES (20)..(20): Xaa is Aib
  MISC_FEATURE (40)..(40): 16 Carbon fatty acyl group covalently bound to Lysine
  MISC_FEATURE (40)..(40): C-terminal amidation

SEQ ID NO: 1235 - protein, 40 aa, Artificial Sequence; identical to SEQ ID NO: 1104
  Synthetic polypeptide
  MOD_RES (2)..(2): Xaa is Aib
  MOD_RES (20)..(20): Xaa is Aib
  MISC_FEATURE (40)..(40): 16 Carbon fatty acyl group covalently bound to Lysine via a dipeptide spacer
  MISC_FEATURE (40)..(40): C-terminal amidation

SEQ ID NO: 1236 - protein, 40 aa, Artificial Sequence; identical to SEQ ID NO: 1123
  Synthetic polypeptide
  MOD_RES (2)..(2): Xaa is Aib
  MOD_RES (20)..(20): Xaa is Aib
  MISC_FEATURE (40)..(40): 16 Carbon fatty acyl group covalently bound to Lysine via a dipeptide spacer
  MISC_FEATURE (40)..(40): C-terminal amidation

SEQ ID NO: 1237 - protein, 40 aa, Artificial Sequence
  Synthetic polypeptide
  MOD_RES (2)..(2): Xaa is Aib
  MISC_FEATURE (10)..(10): 16 Carbon fatty acyl group covalently bound to Lysine via dipeptide spacer
  MOD_RES (20)..(20): Xaa is Aib
  MISC_FEATURE (40)..(40): C-terminal amidation
YXEGTFTSDKSIYLDKQAAXEFVNWLLAGGPSSGAPPPSK

SEQ ID NO: 1238 - protein, 41 aa, Artificial Sequence; identical to SEQ ID NO: 1160
  Synthetic polypeptide
  MISC_FEATURE: Homodimer
  MOD_RES (2)..(2): Xaa is Aib
  MOD_RES (20)..(20): Xaa is Aib
  MISC_FEATURE (40)..(40): 14 Carbon fatty acyl group covelently bound to Lysine
  MISC_FEATURE (41)..(41): C-terminal amidation
  MISC_FEATURE (41)..(41): Cys residue covalently attached to 20 kDa PEG which is in turn covalently attached to a Cys residue of a second peptide having the same structure

SEQ ID NO: 1239 - protein, 41 aa, Artificial Sequence; identical to SEQ ID NO: 1160
  Synthetic polypeptide
  MISC_FEATURE: homodimer
  MOD_RES (2)..(2): Xaa is Aib
  MOD_RES (20)..(20): Xaa is Aib
  MISC_FEATURE (40)..(40): 14 Carbon fatty acyl group covalently bound to Lysine
  MISC_FEATURE (41)..(41): PEG (5kDa) covalently bound to Cysteine
  MISC_FEATURE (41)..(41): C-terminal amidation
  MISC_FEATURE (41)..(41): Cys residue covalently attached to 5 kDa PEG which is in turn covalently attached to a Cys residue of a second peptide having the same structure

SEQ ID NO: 1240 - protein, 29 aa, Artificial Sequence
  Synthetic polypeptide
  MOD_RES (3)..(3): Xaa is a Glutamine analog
  MOD_RES (27)..(27): Xaa is Nle
HSXGTFTSDYSKYLDTRRAAEFVAWLXDE

SEQ ID NO: 1241 - protein, 29 aa, Artificial Sequence
  Synthetic polypeptide
  MOD_RES (3)..(3): Xaa is a Glutamine analog
  MOD_RES (16)..(16): Xaa is Aib
HSXGTFTSDYSKYLDXRRAADFVAWLMDE

SEQ ID NO: 1242 - protein, 29 aa, Artificial Sequence
  Synthetic polypeptide
  MOD_RES (27)..(27): Xaa is Nle
HSQGTFTSDYSKYLDTRRAAEFVAWLXDE

SEQ ID NO: 1243 - protein, 29 aa, Artificial Sequence
  Synthetic peptide
  MOD_RES (3)..(3): Xaa is Acetamidomethyl-cysteine
  MOD_RES (27)..(27): Xaa is Nle
HSXGTFTSDYSKYLDTRRAAEFVAWLXDE

SEQ ID NO: 1244 - protein, 29 aa, Artificial Sequence
  Synthetic peptide
  MOD_RES (3)..(3): Xaa is Acetyldiaminobutanoic acid
  MOD_RES (27)..(27): Xaa is Nle
HSXGTFTSDYSKYLDTRRAAEFVAWLXDE

SEQ ID NO: 1245 - protein, 29 aa, Artificial Sequence
  Synthetic polypeptide
  MOD_RES (3)..(3): Xaa is carbamoyldiaminopropanoic acid
  MOD_RES (27)..(27): Xaa is Nle
HSXGTFTSDYSKYLDTRRAAEFVAWLXDE

SEQ ID NO: 1246 - protein, 29 aa, Artificial Sequence
  Synthetic polypeptide
  MOD_RES (3)..(3): Xaa is Methylglutamine
  MOD_RES (27)..(27): Xaa is Nle
HSXGTFTSDYSKYLDTRRAAEFVAWLXDE

SEQ ID NO: 1247 - protein, 29 aa, Artificial Sequence
  Synthetic peptide
  MOD_RES (3)..(3): Xaa is Methionine sulfoxide
  MOD_RES (27)..(27): Xaa is Nle
HSXGTFTSDYSKYLDTRRAAEFVAWLXDE

SEQ ID NO: 1248 - protein, 29 aa, Artificial Sequence
  Synthetic peptide
  MOD_RES (3)..(3): Xaa is Acetylornithine
  MOD_RES (27)..(27): Xaa is Nle
HSXGTFTSDYSKYLDTRRAAEFVAWLXDE

SEQ ID NO: 1249 - protein, 29 aa, Artificial Sequence
  Synthetic polypeptide
  MOD_RES (16)..(16): Xaa is Aib
HSQGTFTSDYSKYLDXRRAADFVAWLMDE

SEQ ID NO: 1250 - protein, 29 aa, Artificial Sequence
  Synthetic polypeptide
  MOD_RES (3)..(3): Xaa is Acetyldiaminobutanoic acid
  MOD_RES (16)..(16): Xaa is Aib
HSXGTFTSDYSKYLDXRRAADFVAWLMDE

SEQ ID NO: 1251 - protein, 29 aa, Artificial Sequence
  Synthetic polypeptide
  MOD_RES (3)..(3): Xaa is Methylglutamine
  MOD_RES (16)..(16): Xaa is Aib
HSXGTFTSDYSKYLDXRRAADFVAWLMDE

SEQ ID NO: 1252 - protein, 29 aa, Artificial Sequence
  Synthetic polypeptide
HSQGTFTSDYSKYLDSRRAQDFVQWLMDT

SEQ ID NO: 1253 - protein, 29 aa, Artificial Sequence
  Synthetic polypeptide
  MOD_RES (3)..(3): Xaa is Acetyldiaminobutanoic acid
  MOD_RES (16)..(16): Xaa is Aib
HSXGTFTSDYSKYLDXRRAADFVAWLLDE

SEQ ID NO: 1254 - protein, 39 aa, Artificial Sequence; identical to SEQ ID NO: 604
  Synthetic polypeptide
  MOD_RES (3)..(3): Xaa is Acetyldiaminobutanoic acid
  MOD_RES (16)..(16): Xaa is Aib
  MISC_FEATURE (39)..(39): C-terminal amidation

SEQ ID NO: 1255 - protein, 29 aa, Artificial Sequence
  Synthetic polypeptide
  MOD_RES (3)..(3): Xaa is Acetyldiaminobutanoic acid
  MOD_RES (16)..(16): Xaa is Aib
HSXGTFTSDYSKYLDXRRASDFVSWLLDE

SEQ ID NO: 1256 - protein, 29 aa, Artificial Sequence
  Synthetic polypeptide
  MOD_RES (3)..(3): Xaa is Acetyldiaminobutanoic acid
  MOD_RES (16)..(16): Xaa is Aib
HSXGTFTSDYSKYLDXRRATDFVTWLLDE

SEQ ID NO: 1257-1258 - skipped (2 entries)

SEQ ID NO: 1259 - protein, 40 aa, Artificial Sequence
  Synthetic peptide
  MOD_RES (2)..(2): Xaa is Aib
  MISC_FEATURE (16)..(20): Lactam bridge links Glu16 and Lys20
  MOD_RES (40)..(40): Epsilon amine of Lys is attached to Ala-Ac-Cys(PEG), wherein the Ac-Cys(PEG) is a Cys residue comprising an alpha amino group capped with an acetyl group (CH3CO) and comprising a 40 kDa PEG covalently attached to its side chain
YXQGTFTSDYSIYLDEQAAKEFVNWLLAGGPSSGAPPPSK

SEQ ID NO: 1260 - protein, 40 aa, Artificial Sequence; identical to SEQ ID NO: 1259
  Synthetic peptide
  MOD_RES (2)..(2): Xaa is Aib
  MISC_FEATURE (16)..(20): Lactam bridge links Glu16 and Lys20
  MOD_RES (40)..(40): Epsilon amine of Lys is attached to Arg-Ac-Cys(PEG), wherein the Ac-Cys(PEG) is a Cys residue comprising an alpha amino group capped with an acetyl group (CH3CO) and comprising a 40 kDa PEG covalently attached to its side chain

SEQ ID NO: 1261 - protein, 40 aa, Artificial Sequence; identical to SEQ ID NO: 1071
  Synthetic peptide
  MOD_RES (2)..(2): Xaa is Aib
  MISC_FEATURE (16)..(20): Lactam bridge links Glu16 and Lys20
  MOD_RES (40)..(40): Cys-PEG covalently linked via thioether linkage

SEQ ID NO: 1262 - protein, 40 aa, Artificial Sequence
  Synthetic peptide
  MOD_RES (2)..(2): Xaa is Aib
HXQGTFTSDYSKYLDERRAQDFVQWLMNTGPSSGAPPPSK

SEQ ID NO: 1263 - protein, 40 aa, Artificial Sequence; identical to SEQ ID NO: 1165
  Synthetic peptide
  MISC_FEATURE: MT-345
  MOD_RES (2)..(2): Xaa is Aib
  MOD_RES (40)..(40): Acylated with a C14 fatty acyl group
  MOD_RES (40)..(40): AMIDATION

SEQ ID NO: 1264 - protein, 40 aa, Artificial Sequence; identical to SEQ ID NO: 1165
  Synthetic peptide
  MISC_FEATURE: MT-346
  MOD_RES (2)..(2): Xaa is Aib
  MOD_RES (40)..(40): AMIDATION

SEQ ID NO: 1265 - protein, 40 aa, Artificial Sequence
  Synthetic peptide
  MISC_FEATURE: MT-347
  MOD_RES (2)..(2): Xaa is Aib
  MOD_RES (16)..(16): Xaa is Aib
  MOD_RES (40)..(40): Acylated with a C14 fatty acyl group
  MOD_RES (40)..(40): AMIDATION
HXQGTFTSDYSKYLDXQAAKEFICWLMNGGPSSGAPPPSK

SEQ ID NO: 1266 - protein, 40 aa, Artificial Sequence; identical to SEQ ID NO: 1265
  Synthetic peptide
  MISC_FEATURE: MT-348
  MOD_RES (2)..(2): Xaa is Aib
  MOD_RES (16)..(16): Xaa is Aib
  MOD_RES (40)..(40): AMIDATION

SEQ ID NO: 1267 - protein, 40 aa, Artificial Sequence; identical to SEQ ID NO: 1165
  Synthetic peptide
  MISC_FEATURE: MT-349
  MOD_RES (2)..(2): Xaa is Aib
  MOD_RES (24)..(24): Covalently bound to 40kDa PEG via thioether made by reaction of peptide with haloacetyl-activated PEG
  MOD_RES (40)..(40): Acylated with a C14 fatty acyl group
  MOD_RES (40)..(40): AMIDATION

SEQ ID NO: 1268 - protein, 40 aa, Artificial Sequence; identical to SEQ ID NO: 1165
  Synthetic peptide
  MISC_FEATURE: MT-350
  MOD_RES (2)..(2): Xaa is Aib
  MOD_RES (24)..(24): Covalently bound to 40kDa PEG via thioether made by reaction of peptide with haloacetyl-activated PEG
  MOD_RES (40)..(40): AMIDATION

SEQ ID NO: 1269 - protein, 40 aa, Artificial Sequence; identical to SEQ ID NO: 1265
  Synthetic peptide
  MISC_FEATURE: MT-351
  MOD_RES (2)..(2): Xaa is Aib
  MOD_RES (16)..(16): Xaa is Aib
  MOD_RES (24)..(24): Covalently bound to 40kDa PEG via thioether made by reaction of peptide with haloacetyl-activated PEG
  MOD_RES (40)..(40): Acylated with a C14 fatty acyl group
  MOD_RES (40)..(40): AMIDATION

SEQ ID NO: 1270 - protein, 40 aa, Artificial Sequence; identical to SEQ ID NO: 1265
  Synthetic peptide
  MISC_FEATURE: MT-352
  MOD_RES (2)..(2): Xaa is Aib
  MOD_RES (16)..(16): Xaa is Aib
  MOD_RES (24)..(24): Covalently bound to 40kDa PEG via thioether made by reaction of peptide with haloacetyl-activated PEG
  MOD_RES (40)..(40): AMIDATION

SEQ ID NO: 1271 - skipped

SEQ ID NO: 1272 - protein, 40 aa, Artificial Sequence
  Synthetic peptide
  MISC_FEATURE: MT-361
  MOD_RES (2)..(2): Xaa is Aib
  MOD_RES (16)..(16): Xaa is Aib
  MOD_RES (40)..(40): AMIDATION
HXQGTFTSDYSIYLDXQAAKEFVNWLMNGGPSSGAPPPSK

SEQ ID NO: 1273 - protein, 40 aa, Artificial Sequence; identical to SEQ ID NO: 1272
  Synthetic peptide
  MISC_FEATURE: MT-362
  MOD_RES (2)..(2): Xaa is Aib
  MOD_RES (16)..(16): Xaa is Aib
  MOD_RES (40)..(40): Acylated with a C16 fatty acyl group
  MOD_RES (40)..(40): AMIDATION

SEQ ID NO: 1274 - protein, 40 aa, Artificial Sequence
  Synthetic peptide
  MISC_FEATURE: MT-363
  MOD_RES (2)..(2): Xaa is Aib
  MOD_RES (40)..(40): AMIDATION
HXQGTFTSDYSKYLDEQAAKEFIAWLMNGGPSSGAPPPSK

SEQ ID NO: 1275 - protein, 40 aa, Artificial Sequence; identical to SEQ ID NO: 1274
  Synthetic peptide
  MISC_FEATURE: MT-364
  MOD_RES (2)..(2): Xaa is Aib
  MOD_RES (40)..(40): Acylated with a C16 fatty acyl group
  MOD_RES (40)..(40): AMIDATION

SEQ ID NO: 1276-1300 - skipped (25 entries)

SEQ ID NO: 1301 - protein, 29 aa, Homo sapiens
HSQGTFTSDYSKYLDSRRAQDFVQWLMNT

SEQ ID NO: 1302 - protein, 28 aa, Artificial Sequence
  Synthetic Polypeptide
  MISC_FEATURE: Glucagon analogue
  MISC_FEATURE (8)..(8): Xaa is aspartic acid, glutamic acid, cysteic acid or homocysteic acid
SQGTFTSXYSKYLDSRRAQDFVQWLMNT

SEQ ID NO: 1303 - protein, 27 aa, Artificial Sequence
  Synthetic Polypeptide
  MISC_FEATURE: Glucagon analogue
  MISC_FEATURE (7)..(7): Xaa is aspartic acid, glutamic acid, cysteic acid or homocysteic acid
QGTFTSXYSKYLDSRRAQDFVQWLMNT

SEQ ID NO: 1304 - protein, 26 aa, Artificial Sequence
  Synthetic Polypeptide
  MISC_FEATURE: Glucagon analogue
  MISC_FEATURE (6)..(6): Xaa is aspartic acid, glutamic acid, cysteic acid or homocysteic acid
GTFTSXYSKYLDSRRAQDFVQWLMNT

SEQ ID NO: 1305 - protein, 25 aa, Artificial Sequence
  Synthetic Polypeptide
  MISC_FEATURE: Glucagon analogue
  MISC_FEATURE (5)..(5): Xaa is aspartic acid, glutamic acid, cysteic acid or homocysteic acid
TFTSXYSKYLDSRRAQDFVQWLMNT

SEQ ID NO: 1306 - protein, 24 aa, Artificial Sequence
  Synthetic Polypeptide
  MISC_FEATURE: Glucagon analogue
  MISC_FEATURE (4)..(4): Xaa is glutamic acid, cysteic acid or homocysteic acid
  MISC_FEATURE (22)..(22): Xaa at position 22 is Met, Leu or Nle
FTSXYSKYLDSRRAQDFVQWLXNT

SEQ ID NO: 1307 - protein, 24 aa, Artificial Sequence
  Synthetic Polypeptide
  MOD_RES (1)..(1): N-terminal amino group replaced with hydroxy group
  MISC_FEATURE (4)..(4): Xaa is aspartic acid, glutamic acid, cysteic acid or homocysteic acid
  MISC_FEATURE (22)..(22): Xaa is Met, Leu or Nle
FTSXYSKYLDSRRAQDFVQWLXNT

SEQ ID NO: 1308 - protein, 24 aa, Artificial Sequence
  Synthetic Polypeptide
  MOD_RES (1)..(1): N-terminal amino group replaced with hydroxy group
  MISC_FEATURE (22)..(22): Xaa is  Met, Leu or Nle
  MOD_RES (24)..(24): C-terminal alpha carboxylate replaced with amide
FTSDYSRYLDSRRAQDFVQWLXNT

SEQ ID NO: 1309 - protein, 24 aa, Artificial Sequence
  Synthetic Polypeptide
  MISC_FEATURE: Glucagon analogue
  MOD_RES (1)..(1): N-terminal amino group replaced with hydroxy group
  MISC_FEATURE (4)..(4): Xaa is aspartic acid, glutamic acid, cysteic acid or homocysteic acid
  MISC_FEATURE (7)..(7): Xaa is Lys or Arg
  MISC_FEATURE (11)..(11): Xaa is Lys, Cys, Orn, homocysteine or acetyl phenyalanine
  MISC_FEATURE (22)..(22): Xaa is Met, Leu or Nle
FTSXYSXYLDXRRAQDFVQWLXNT

SEQ ID NO: 1310 - protein, 24 aa, Artificial Sequence
  Synthetic Polypeptide
  MISC_FEATURE: Glucagon analogue
  MOD_RES (1)..(1): N-terminal amino group replaced with hydroxy group
  MISC_FEATURE (4)..(4): Xaa is aspartic acid, glutamic acid, cysteic acid or homocysteic acid
  MISC_FEATURE (7)..(7): Xaa is is Lys or Arg
  MISC_FEATURE (16)..(16): Xaa is Lys, Cys, Orn, homocysteine or acetyl phenylalanine
  MISC_FEATURE (22)..(22): Xaa is Met, Leu or Nle
FTSXYSXYLDSRRAQXFVQWLXNT

SEQ ID NO: 1311 - protein, 24 aa, Artificial Sequence
  Synthetic Polypetide
  MISC_FEATURE: Glucagon analogue
  MOD_RES (1)..(1): N-terminal amino group replaced with hydroxy group
  MISC_FEATURE (4)..(4): Xaa is aspartic acid, glutamic acid, cysteic acid or homocysteic acid
  MISC_FEATURE (7)..(7): Xaa is Lys or Arg
  MISC_FEATURE (19)..(19): Xaa is Lys, Cys, Orn, homocysteine or acetyl phenylalanine
  MISC_FEATURE (22)..(22): Xaa is Met, Leu or Nle
FTSXYSXYLDSRRAQDFVXWLXNT

SEQ ID NO: 1312 - protein, 24 aa, Artificial Sequence
  Synthetic Polypeptide
  MISC_FEATURE: Glucagon analogue
  MOD_RES (1)..(1): N-terminal amino group replaced with hydroxy group
  MISC_FEATURE (4)..(4): Xaa is aspartic acid, glutamic acid, cysteic acid or homocysteic acid
  MISC_FEATURE (7)..(7): Xaa is Lys or Arg
  MISC_FEATURE (11)..(11): Xaa is Lys, Cys, Orn, homocysteine or acetyl phenylalanine
  MISC_FEATURE (19)..(19): Xaa is Lys, Cys, Orn, homocysteine or acetyl phenylalanine
  MISC_FEATURE (22)..(22): Xaa is Met, Leu or Nle
FTSXYSXYLDXRRAQDFVXWLXNT

SEQ ID NO: 1313 - protein, 24 aa, Artificial Sequence
  Synthetic Polypeptide
  MISC_FEATURE: Glucagon analogue
  MOD_RES (1)..(1): N-terminal amino group replaced with hydroxy group
  MISC_FEATURE (4)..(4): Xaa is aspartic acid, glutamic acid, cysteic acid or homocysteic acid
  MOD_RES (11)..(11): Pegylated
  MISC_FEATURE (22)..(22): Xaa is Met, Leu or Nle
FTSXYSKYLDCRRAQDFVQWLXNT

SEQ ID NO: 1314 - protein, 24 aa, Artificial Sequence
  Synthetic Polypeptide
  MISC_FEATURE: Glucagon analogue
  MOD_RES (1)..(1): N-terminal amino group replaced with hydroxy group
  MISC_FEATURE (4)..(4): Xaa is aspartic acid, glutamic acid, cysteic acid or homocysteic acid
  MOD_RES (19)..(19): Pegylated
  MISC_FEATURE (22)..(22): Xaa is Met, Leu or Nle
FTSXYSKYLDSRRAQDFVCWLXNT

SEQ ID NO: 1315 - protein, 24 aa, Artificial Sequence
  Synthetic Polypeptide
  MISC_FEATURE: Glucagon analogue
  MOD_RES (1)..(1): N-terminal amino group replaced with hydroxy group
  MISC_FEATURE (4)..(4): Xaa is aspartic acid, glutamic acid, cysteic acid or homocysteic acid
  MISC_FEATURE (22)..(22): Xaa is Met, Leu or Nle
  MOD_RES (24)..(24): Pegylated
FTSXYSKYLDSRRAQDFVQWLXNC

SEQ ID NO: 1316 - protein, 24 aa, Artificial Sequence
  Synthetic Polypeptide
  MISC_FEATURE: Glucagon analogue
  MOD_RES (1)..(1): N-terminal amino group replaced with hydroxy group
  MISC_FEATURE (4)..(4): Xaa is aspartic acid, glutamic acid, cysteic acid or homocysteic acid
  MOD_RES (19)..(19): Pegylated
  MISC_FEATURE (22)..(22): Xaa is Met, Leu or Nle
FTSXYSRYLDSRRAQDFVKWLXNT

SEQ ID NO: 1317 - protein, 24 aa, Artificial Sequence
  Synthetic Polypeptide
  MISC_FEATURE: Glucagon analogue
  MOD_RES (1)..(1): N-terminal amino group replaced with hydroxy group
  MISC_FEATURE (4)..(4): Xaa is aspartic acid, glutamic acid, cysteic acid or homocysteic acid
  MOD_RES (11)..(11): Pegylated
  MISC_FEATURE (22)..(22): Xaa is Met, Leu or Nle
FTSXYSKYLDCRRAQDFVCWLXNT

SEQ ID NO: 1318 - protein, 24 aa, Artificial Sequence
  Synthetic Polypeptide
  MISC_FEATURE: Glucagon analogue
  MOD_RES (1)..(1): N-terminal amino group replaced with hydroxy group
  MISC_FEATURE (4)..(4): Xaa is aspartic acid, glutamic acid, cysteic acid or homocysteic acid
  MISC_FEATURE (22)..(22): Xaa is Met, Leu or Nle
  MOD_RES (24)..(24): C-terminal alpha carboxylate replaced with amide
FTSXYSKYLECRRAQDFVQWLXNT

SEQ ID NO: 1319 - protein, 10 aa, Artificial Sequence
  Synthetic Polypeptide
  MISC_FEATURE: Peptide fragment representing the carboxy terminal 10 amino acids of Exendin-4
GPSSGAPPPS

SEQ ID NO: 1320 - protein, 8 aa, Artificial Sequence
  Synthetic Polypeptide
  MISC_FEATURE: Peptide fragment representing the carboxy terminal 8 amino acids of oxyntomodulin
KRNRNNIA

SEQ ID NO: 1321 - protein, 4 aa, Artificial Sequence
  Synthetic Polypeptide
  MISC_FEATURE: Peptide fragment representing the carboxy 4 amino acids of oxyntomodulin carboxy terminus
KRNR

SEQ ID NO: 1322 - protein, 24 aa, Artificial Sequence
  Synthetic Polypeptide
  MISC_FEATURE: Glucagon analogue
  MISC_FEATURE (7)..(7): Xaa is Lys or Arg
  MISC_FEATURE (11)..(11): Xaa is Lys, Cys, Orn, homocycstein or acetyl phenyalanine
  MISC_FEATURE (19)..(19): Xaa is Lys, Cys, Orn, homocycstein or acetyl phenyalanine
FTSRYSXYLDXRRAQDFVXWLMNT

SEQ ID NO: 1323 - protein, 34 aa, Artificial Sequence
  Synthetic Polypeptide
  MISC_FEATURE: Glucagon analogue
  MISC_FEATURE (4)..(4): Xaa is aspartic acid, glutamic acid, cysteic acid or homocysteic acid
  MISC_FEATURE (7)..(7): Xaa is Lys or Arg
  MISC_FEATURE (16)..(16): Xaa is Lys, Cys, Orn, homocysteine or acetyl phenylalanine
  MISC_FEATURE (22)..(22): Xaa is Met, Leu or Nle
FTSXYSXYLDSRRAQXFVQWLXNTGPSSGAPPPS

SEQ ID NO: 1324 - protein, 32 aa, Artificial Sequence
  Synthetic Polypeptide
  MISC_FEATURE: Glucagon analogue
  MISC_FEATURE (4)..(4): Xaa is aspartic acid, glutamic acid, cysteic acid or homocysteic acid
  MISC_FEATURE (7)..(7): Xaa is Lys or Arg
  MISC_FEATURE (19)..(19): Xaa is Lys, Cys, Orn, homocysteine or acetyl phenylalanine
  MOD_RES (19)..(19): Pegylated
  MISC_FEATURE (22)..(22): Xaa is Met, Leu or Nle
FTSXYSXYLDSRRAQDFVXWLXNTKRNRNNIA

SEQ ID NO: 1325 - protein, 34 aa, Artificial Sequence
  Synthetic Polypeptide
  MISC_FEATURE: Glucagon analogue
  MISC_FEATURE (4)..(4): Xaa is aspartic acid, glutamic acid, cysteic acid or homocysteic acid
  MISC_FEATURE (7)..(7): Xaa is Lys or Arg
  MISC_FEATURE (19)..(19): Xaa is Lys, Cys, Orn, homocysteine or acetyl phenylalanine
  MOD_RES (19)..(19): Pegylated
  MISC_FEATURE (22)..(22): Xaa is Met, Leu or Nle
FTSXYSXYLDSRRAQDFVXWLXNTGPSSGAPPPS

SEQ ID NO: 1326 - protein, 32 aa, Artificial Sequence
  Synthetic Polypeptide
  MISC_FEATURE: Glucagon analogue
  MISC_FEATURE (4)..(4): Xaa is aspartic acid, glutamic acid, cysteic acid or homocysteic acid
  MISC_FEATURE (7)..(7): Xaa is Lys or Arg
  MISC_FEATURE (16)..(16): Xaa is Lys, Cys, Orn, homocysteine or acetyl phenylalanine
  MOD_RES (16)..(16): Pegylation
  MISC_FEATURE (22)..(22): Xaa is Met, Leu or Nle
FTSXYSXYLDSRRAQXFVQWLXNTKRNRNNIA

SEQ ID NO: 1327 - protein, 28 aa, Artificial Sequence
  Synthetic Polypeptide
  MISC_FEATURE: Glucagon analogue
  MISC_FEATURE (4)..(4): Xaa is aspartic acid, glutamic acid, cysteic acid or homocysteic acid
  MISC_FEATURE (7)..(7): Xaa is Lys or Arg
  MISC_FEATURE (16)..(16): Xaa is Lys, Cys, Orn, homocysteine or acetyl phenylalanine
  MOD_RES (16)..(16): Pegylated
  MISC_FEATURE (22)..(22): Xaa is Met, Leu or Nle
FTSXYSXYLDSRRAQXFVQWLXNTKRNR

SEQ ID NO: 1328 - protein, 28 aa, Artificial Sequence
  Synthetic Polypeptide
  MISC_FEATURE: Glucagon analogue
  MISC_FEATURE (4)..(4): Xaa is aspartic acid, glutamic acid, cysteic acid or homocysteic acid
  MISC_FEATURE (7)..(7): Xaa is Lys or Arg
  MISC_FEATURE (19)..(19): Xaa is Lys, Cys, Orn, homocysteine or acetyl phenylalanine
  MOD_RES (19)..(19): Pegylated
  MISC_FEATURE (22)..(22): Xaa is Met, Leu or Nle
FTSXYSXYLDSRRAQDFVXWLXNTKRNR

SEQ ID NO: 1329 - protein, 34 aa, Artificial Sequence
  Synthetic Polypeptide
  MISC_FEATURE: Glucagon analogue
  MOD_RES (1)..(1): N-terminal amino group replaced with hydroxy group
  MISC_FEATURE (4)..(4): Xaa is aspartic acid, glutamic acid, cysteic acid or homocysteic acid
  MISC_FEATURE (22)..(22): Xaa is Met, Leu or Nle
FTSXYSKYLDSRRAQDFVQWLXNTGPSSGAPPPS

SEQ ID NO: 1330 - protein, 32 aa, Artificial Sequence
  Synthetic Polypeptide
  MISC_FEATURE: Glucagon analogue
  MOD_RES (1)..(1): N-terminal amino group replaced with hydroxy group
  MISC_FEATURE (4)..(4): Xaa is aspartic acid, glutamic acid, cysteic acid or homocysteic acid
  MISC_FEATURE (22)..(22): Xaa is Met, Leu or Nle
FTSXYSKYLDSRRAQDFVQWLXNTKRNRNNIA

SEQ ID NO: 1331 - protein, 28 aa, Artificial Sequence
  Synthetic Polypeptide
  MISC_FEATURE: Glucagon analogue
  MOD_RES (1)..(1): N-terminal amino group replaced with hydroxy group
  MISC_FEATURE (4)..(4): Xaa is aspartic acid, glutamic acid, cysteic acid or homocysteic acid
  MISC_FEATURE (22)..(22): Xaa is Met, Leu or Nle
FTSXYSKYLDSRRAQCFVQWLXNTKRNR

SEQ ID NO: 1332 - protein, 29 aa, Artificial Sequence
  Synthetic Polypeptide
  MISC_FEATURE: Glucagon analogue
HSQGTFTSDYSKYLDSCRAQDFVQWLMNT

SEQ ID NO: 1333 - protein, 39 aa, Artificial Sequence; identical to SEQ ID NO: 36
  Synthetic Polypeptide
  MISC_FEATURE: Glucagon analogue

SEQ ID NO: 1334 - protein, 29 aa, Artificial Sequence
  Synthetic Polypeptide
  MISC_FEATURE: Glucagon analogue
  MOD_RES (24)..(24): 2-butyrolactone bound through thiol group of Cysteine
HSQGTFTSDYSKYLDSRRAQCFVQWLMNT

SEQ ID NO: 1335 - protein, 29 aa, Artificial Sequence
  Synthetic Polypeptide
  MISC_FEATURE: Glucagon Analogue
  MOD_RES (24)..(24): Carboxymethyl group bound through thiol group of Cysteine
HSQGTFTSDYSKYLDSRRAQCFVQWLMNT

SEQ ID NO: 1336 - protein, 24 aa, Artificial Sequence
  Synthetic Polypeptide
  MISC_FEATURE: Glucagon analogue
  MOD_RES (1)..(1): N-terminal amino group replaced with hydroxy group
  MISC_FEATURE (4)..(4): Xaa is aspartic acid, glutamic acid, cysteic acid or homocysteic acid
  MISC_FEATURE (22)..(22): Xaa is Met, Leu or Nle
FTSXYSKYLESRRAQDFVQWLXNT

SEQ ID NO: 1337 - protein, 24 aa, Artificial Sequence
  Synthetic Polypeptide
  MISC_FEATURE: Glucagon analogue
  MOD_RES (1)..(1): N-terminal amino group replaced with hydroxy group
  MISC_FEATURE (22)..(22): Xaa is Met, Leu or Nle
FTSDYSKYLDSRRAQDFVQWLXNT

SEQ ID NO: 1338 - protein, 24 aa, Artificial Sequence
  Synthetic Polypeptide
  MISC_FEATURE: Glucagon analogue
  MOD_RES (1)..(1): N-terminal amino group replaced with hydroxy group
  MISC_FEATURE (22)..(22): Xaa is Met, Leu or Nle
FTSDYSKYLESRRAQDFVQWLXNT

SEQ ID NO: 1339 - protein, 24 aa, Artificial Sequence
  Synthetic Polypeptide
  MISC_FEATURE: Glucagon analogue
  MISC_FEATURE (1)..(1): N-terminal amino group replaced with hydroxy group
  MISC_FEATURE (4)..(4): Xaa is aspartic acid, glutamic acid, cysteic acid or homocysteic acid
  MISC_FEATURE (22)..(22): Xaa is Met, Leu or Nle
  MISC_FEATURE (23)..(23): Xaa is Asn, Asp, Glu, cysteic acid or homocysteic acid
  MISC_FEATURE (24)..(24): Xaa id Thr, Asp, Glu, cysteic acid or homocysteic acid
FTSXYSKYLDSRRAQDFVQWLXXX

SEQ ID NO: 1340 - protein, 24 aa, Artificial Sequence
  Synthetic Polypeptide
  MISC_FEATURE: Glucagon analogue
  MOD_RES (1)..(1): N-terminal amino group replaced with hydroxy group
  MISC_FEATURE (4)..(4): Xaa is aspartic acid, glutamic acid, cysteic acid or homocysteic acid
  MISC_FEATURE (10)..(10): Xaa is Glu, cysteic acid, homoglutamic acid or homocysteic acid
  MISC_FEATURE (22)..(22): Xaa is Met, Leu or Nle
  MISC_FEATURE (23)..(23): Xaa is Asn or an acidic amino acid
  MISC_FEATURE (24)..(24): Xaa is Thr or an acidic amino acid
FTSXYSKYLXSRRAQDFVQWLXXX

SEQ ID NO: 1341 - protein, 24 aa, Artificial Sequence
  Synthetic Polypeptide
  MISC_FEATURE: Glucagon analogue
  MOD_RES (1)..(1): N-terminal amino group replaced with hydroxy group
  MISC_FEATURE (4)..(4): Xaa is aspartic acid, glutamic acid, cysteic acid or homocysteic acid
  MISC_FEATURE (10)..(10): Xaa is Glu, cysteic acid, homoglutamic acid or homocysteic acid
  MISC_FEATURE (22)..(22): Xaa is Met, Leu or Nle
  MISC_FEATURE (23)..(23): Xaa is Asn, Asp or Glu
  MISC_FEATURE (24)..(24): Xaa is Thr, glu or Asp
FTSXYSKYLXSRRAQDFVQWLXXX

SEQ ID NO: 1342 - protein, 24 aa, Artificial Sequence
  Synthetic Polypeptide
  MISC_FEATURE: Glucagon analogue
  MOD_RES (1)..(1): N-terminal amino group replaced with hydroxy group
  MISC_FEATURE (4)..(4): Xaa is aspartic acid, glutamic acid, cysteic acid or homocysteic acid
  MISC_FEATURE (10)..(10): Xaa is Glu, cysteic acid, homoglutamic acid or homocysteic acid
  MISC_FEATURE (22)..(22): Xaa is Met, Leu or Nle
  MISC_FEATURE (23)..(23): Xaa is Asn or an acidic amino acid
  MISC_FEATURE (24)..(24): Xaa is Thr or an acidic amino acid
FTSXYSKYLXSRRAQDFVQWLXXX

SEQ ID NO: 1343 - protein, 24 aa, Artificial Sequence
  Synthetic Polypeptide
  MISC_FEATURE: Glucagon analogue
  MOD_RES (1)..(1): N-terminal amino group replaced with hydroxy group
  MISC_FEATURE (4)..(4): Xaa is aspartic acid, glutamic acid, cysteic acid or homocysteic acid
  MISC_FEATURE (10)..(10): Xaa is Asp, Glu, cysteic acid, homoglutamic acid or homocysteic acid
  MOD_RES (11)..(11): 20kDa PEG group attached to Xaa at position 11
  MISC_FEATURE (22)..(22): Xaa is Met, Leu or Nle
  MISC_FEATURE (23)..(23): Xaa is Asn or an acidic amino acid
  MISC_FEATURE (24)..(24): Xaa is Thr or an acidic amino acid
FTSXYSKYLXCRRAQDFVQWLXXX

SEQ ID NO: 1344 - protein, 24 aa, Artificial Sequence
  Synthetic Polypeptide
  MISC_FEATURE: Glucagon analogue
  MOD_RES (1)..(1): N-terminal amino group replaced with hydroxy group
  MISC_FEATURE (4)..(4): Xaa is aspartic acid, glutamic acid, cysteic acid or homocysteic acid
  MISC_FEATURE (10)..(10): Xaa is Asp, Glu, cysteic acid, homoglutamic acid or homocysteic acid
  MOD_RES (16)..(16): 20kDa PEG group attached to Xaa at position 16
  MISC_FEATURE (22)..(22): Xaa is Met, Leu or Nle
  MISC_FEATURE (23)..(23): Xaa is Asn or an acidic amino acid
  MISC_FEATURE (24)..(24): Xaa is Thr or an acidic amino acid
FTSXYSKYLXSRRAQCFVQWLXXX

SEQ ID NO: 1345 - protein, 24 aa, Artificial Sequence
  Synthetic Polypeptide
  MISC_FEATURE: Glucagon analogue
  MOD_RES (1)..(1): N-terminal amino group replaced with hydroxy group
  MISC_FEATURE (4)..(4): Xaa is aspartic acid, glutamic acid, cysteic acid or homocysteic acid
  MISC_FEATURE (10)..(10): Xaa is Asp, Glu, cysteic acid, homoglutamic acid or homocysteic acid
  MOD_RES (19)..(19): Pegylated
  MISC_FEATURE (22)..(22): Xaa is Met, Leu or Nle
  MISC_FEATURE (23)..(23): Xaa is Asn or an acidic amino acid
  MISC_FEATURE (24)..(24): Xaa is Thr or an acidic amino acid
FTSXYSKYLXSRRAQDFVCWLXXX

SEQ ID NO: 1346 - protein, 35 aa, Artificial Sequence
  Synthetic Polypeptide
  MISC_FEATURE: Glucagon analogue
  MOD_RES (1)..(1): N-terminal amino group replaced with hydroxy group
  MISC_FEATURE (4)..(4): Xaa is aspartic acid, glutamic acid, cysteic acid or homocysteic acid
  MISC_FEATURE (10)..(10): Xaa is Asp, Glu, cysteic acid, homoglutamic acid or homocysteic acid
  MISC_FEATURE (22)..(22): Xaa is Met, Leu or Nle
  MISC_FEATURE (23)..(23): Xaa is Asn or an acidic amino acid
  MISC_FEATURE (24)..(24): Xaa is Thr or an acidic amino acid
  MISC_FEATURE (25)..(25): Xaa is Lys, Cys, Orn, homocycstein or acetyl phenyalanine
  MOD_RES (25)..(25): Pegylated
FTSXYSKYLXSRRAQDFVQWLXXXXGPSSGAPPPS

SEQ ID NO: 1347 - protein, 35 aa, Artificial Sequence
  Synthetic Polypeptide
  MISC_FEATURE: Glucagon analogue
  MOD_RES (1)..(1): N-terminal amino group replaced with hydroxy group
  MISC_FEATURE (4)..(4): Xaa is aspartic acid, glutamic acid, cysteic acid or homocysteic acid
  MISC_FEATURE (10)..(10): Xaa is Asp, Glu, cysteic acid, homoglutamic acid or homocysteic acid
  MISC_FEATURE (22)..(22): Xaa is Met, Leu or Nle
  MISC_FEATURE (23)..(23): Xaa is Asn or an acidic amino acid
  MISC_FEATURE (24)..(24): Xaa is Thr or an acidic amino acid
  MISC_FEATURE (35)..(35): Xaa is Lys, Cys, Orn, homocysteine or acetyl phenyalanine
  MOD_RES (35)..(35): Pegylated
FTSXYSKYLXSRRAQDFVQWLXXXGPSSGAPPPSX

SEQ ID NO: 1348 - protein, 39 aa, Artificial Sequence; identical to SEQ ID NO: 39
  Synthetic Polypeptide
  MISC_FEATURE: Glucagon analogue

SEQ ID NO: 1349 - protein, 35 aa, Artificial Sequence
  Synthetic Polypeptide
  MISC_FEATURE: Glucagon analogue
  MOD_RES (1)..(1): N-terminal amino group replaced with hydroxy group
  MISC_FEATURE (4)..(4): Xaa is aspartic acid, glutamic acid, cysteic acid or homocysteic acid
  MISC_FEATURE (7)..(7): Xaa is Lys or Arg
  MISC_FEATURE (22)..(22): Xaa is Met , Leu or Nle
  MISC_FEATURE (35)..(35): Xaa is Lys, Cys, Orn, homocysteine or acetyl phenyalanine
  MOD_RES (35)..(35): Pegylated
FTSXYSXYLDSRRAQDFVQWLXNTGPSSGAPPPSX

SEQ ID NO: 1350 - protein, 24 aa, Artificial Sequence
  Synthetic Polypeptide
  MISC_FEATURE: Glucagon analogue
  MOD_RES (1)..(1): N-terminal amino group replaced with hydroxy group
FTSEYSKYLDSRRAQDFVQWLMNT

SEQ ID NO: 1351 - protein, 20 aa, Artificial Sequence
  Synthetic Polypeptide
  MISC_FEATURE: Glucagon analogue
YSKYLDSRRAQDFVQWLMNT

SEQ ID NO: 1352 - protein, 24 aa, Artificial Sequence
  Synthetic Polypeptide
  MISC_FEATURE: Glucagon analogue
  MISC_FEATURE (4)..(4): Xaa is Homocysteic acid
FTSXYSKYLDSRRAQDFVQWLMNT

SEQ ID NO: 1353 - protein, 11 aa, Artificial Sequence
  Synthetic Polypeptide
  MISC_FEATURE: Peptide fragment representing the carboxy terminal 10 amino acids of Exendin-4
  MISC_FEATURE (11)..(11): Xaa is Lys, Cys, Orn, homocysteine or acetyl phenyalanine
GPSSGAPPPSX

SEQ ID NO: 1354 - protein, 6 aa, Artificial Sequence
  Synthetic Polypeptide
  MISC_FEATURE (6)..(6): Xaa is phenyl lactic acid
HSQGTX

SEQ ID NO: 1355 - protein, 5 aa, Artificial Sequence
  Synthetic Polypeptide
  MISC_FEATURE (5)..(5): Xaa is phenyl lactic acid
SQGTX

SEQ ID NO: 1356 - protein, 4 aa, Artificial Sequence
  Synthetic Polypeptide
  MISC_FEATURE (4)..(4): Xaa is phenyl lactic acid
QGTX

SEQ ID NO: 1357 - protein, 3 aa, Artificial Sequence
  Synthetic Polypeptide
  MISC_FEATURE (3)..(3): Xaa is phenyl lactic acid
GTX

SEQ ID NO: 1358 - protein, 2 aa, Artificial Sequence
  Synthetic Polypeptide
  MISC_FEATURE (2)..(2): Xaa is phenyl lactic acid
TX

SEQ ID NO: 1359 - protein, 6 aa, Artificial Sequence
  Synthetic Polypeptide
  MISC_FEATURE (1)..(1): Xaa is selected from a group consisting of His, D-histidine, alpha, alpha-dimethyl imidiazole acetic acid (DMIA), N-methyl histidine, alpha-methyl histidine, imidazole acetic acid, desaminohistidine, hydroxyl-histidine, acetyl-histidine and
  MISC_FEATURE (2)..(2): Xaa is selected from a group consisting of Ser, D-serine, D-alanine, Val, Gly, N-methyl serine, N-methyl alanine, and aminoisobutyric acid (AIB)
  MISC_FEATURE (3)..(3): Xaa is selected from a group consisting of Glu or Gln
  MISC_FEATURE (6)..(6): Xaa is phenyl lactic acid
XXXGTX

SEQ ID NO: 1360 - protein, 5 aa, Artificial Sequence
  Synthetic Polypeptide
  MISC_FEATURE (1)..(1): Xaa is selected from a group consisting of Ser, D-serine, D-alanine, Val, Gly, N-methyl serine, N-methyl alanine, and aminoisobutyric acid (AIB)
  MISC_FEATURE (2)..(2): Xaa is selected from a group consisting of Glu or Gln
  MISC_FEATURE (5)..(5): Xaa is phenyl lactic acid
XXGTX

SEQ ID NO: 1361 - protein, 4 aa, Artificial Sequence
  Synthetic Polypeptide
  MISC_FEATURE (1)..(1): Xaa is selected from a group consisting of Glu and Gln
  MISC_FEATURE (4)..(4): Xaa is phenyl lactic acid
XGTX

SEQ ID NO: 1362 - protein, 24 aa, Artificial Sequence
  Synthetic Polypeptide
  MOD_RES (1)..(1): N-terminal amino group replaced with hydroxy group
  MOD_RES (24)..(24): C-terminal alpha carboxylate optionally replaced with amide
FTSDYSKYLDSRRAQDFVQWLMDT

SEQ ID NO: 1363 - protein, 28 aa, Artificial Sequence
  Synthetic Polypeptide
  MOD_RES (28)..(28): C-terminal alpha carboxylate optionally replaced with amide
SQGTFTSEYSKYLDSRRAQDFVQWLMNT

SEQ ID NO: 1364 - protein, 28 aa, Artificial Sequence
  Synthetic Polypeptide
  MISC_FEATURE (4)..(5): Threonine in position 4 and phenyl lactic acid in position 5 linked via ester bond
  MISC_FEATURE (5)..(5): Xaa is phenyl lactic acid
  MOD_RES (28)..(28): Optional C-terminal alpha carboxylate replaced with amide
  MOD_RES (28)..(28): C-terminal alpha carboxylate optionally replaced with amide
SQGTXTSEYSKYLDSRRAQDFVQWLMNT

SEQ ID NO: 1365 - protein, 29 aa, Artificial Sequence
  Synthetic Polypeptide
  MISC_FEATURE (5)..(6): Threonine in position 5 and phenyl lactic acid in position 6 linked via ester bond
  MISC_FEATURE (6)..(6): Xaa is phenyl lactic acid
  MOD_RES (29)..(29): C-terminal alpha carboxylate optionally replaced with amide
HSQGTXTSEYSKYLDSRRAQDFVQWLMNT

SEQ ID NO: 1366 - protein, 24 aa, Artificial Sequence
  Synthetic Polypeptide
  MOD_RES (1)..(1): N-terminal amino group replaced with hydroxy group
  MISC_FEATURE (11)..(11): Xaa is amino isobutyric acid
FTSDYSKYLDXRRAQDFVQWLMNT

SEQ ID NO: 1367 - protein, 24 aa, Artificial Sequence
  Synthetic Polypeptide
  MOD_RES (1)..(1): N-terminal amino group replaced with hydroxy group
FTSDYSKYLDERRAQDFVQWLMNT

SEQ ID NO: 1368 - protein, 6 aa, Artificial Sequence
  Synthetic Polypeptide
  MISC_FEATURE (1)..(1): Xaa is selected from a group consisting of His, D-histidine, alpha, alpha-dimethyl imidiazole acetic acid (DMIA), N-methyl histidine, alpha-methyl histidine, imidazole acetic acid, desaminohistidine, hydroxyl-histidine, acetyl-histidine and
  MISC_FEATURE (2)..(2): Xaa is selected from a group consisting of Ser, D-serine, D-alanine, Val, Gly, N-methyl serine, N-methyl alanine, and aminoisobutyric acid (AIB)
  MISC_FEATURE (3)..(3): Xaa is selected from a group consisting of Glu or Gln
XXXTGF

SEQ ID NO: 1369 - protein, 5 aa, Artificial Sequence
  Synthetic Polypeptide
  MISC_FEATURE (1)..(1): Xaa is selected from a group consisting of Ser, D-serine, D-alanine, Val, Gly, N-methyl serine, N-methyl alanine, and aminoisobutyric acid (AIB)
  MISC_FEATURE (2)..(2): Xaa is selected from a group consisting of Glu or Gln
XXTGF

SEQ ID NO: 1370 - protein, 4 aa, Artificial Sequence
  Synthetic Polypeptide
  MISC_FEATURE (1)..(1): Xaa is selected from a group consisting of Glu or Gln
XTGF

SEQ ID NO: 1371 - protein, 24 aa, Artificial Sequence
  Synthetic Polypeptide
  MOD_RES (1)..(1): N-terminal amino group replaced with hydroxy group
  MISC_FEATURE (24)..(24): C-terminal alpha carboxylate optionally replaced with an amide
FTSEYSKYLDSRRAQDFVQWLMNT

SEQ ID NO: 1372-1400 - skipped (29 entries)

SEQ ID NO: 1401 - protein, 29 aa, Homo sapiens
HSQGTFTSDYSKYLDSRRAQDFVQWLMNT

SEQ ID NO: 1402 - protein, 24 aa, Artificial Sequence
  Synthetic Polypeptide
  MISC_FEATURE: Glucagon analogue
  MOD_RES (1)..(1): N-terminal amino group replaced with hydroxy group
FTSDYSKYLDSRRAQDFVQWLMNT

SEQ ID NO: 1403 - protein, 31 aa, Homo sapiens; identical to SEQ ID NO: 50

SEQ ID NO: 1404 - protein, 30 aa, Homo sapiens; identical to SEQ ID NO: 52

SEQ ID NO: 1405 - protein, 24 aa, Artificial Sequence
  Synthetic Polypeptide
  MISC_FEATURE: Glucagon analogue
  MOD_RES (1)..(1): N-terminal amino group replaced with hydroxy group
FTSDYSKYLDERRAQDFVQWLMNT

SEQ ID NO: 1406 - protein, 24 aa, Artificial Sequence
  Synthetic Polypeptide
  MOD_RES (1)..(1): N-terminal amino group replaced with hydroxy group
FTSDYSKYLDERRAKDFVQWLMNT

SEQ ID NO: 1407 - protein, 24 aa, Artificial Sequence
  Synthetic Polypeptide
  MISC_FEATURE: Glucagon analogue
  MOD_RES (1)..(1): N-terminal amino group replaced with hydroxy group
  MISC_FEATURE (11)..(11): Xaa is Ser or Glu
FTSDYSKYLDXRRAKDFVEWLMNT

SEQ ID NO: 1408 - protein, 24 aa, Artificial Sequence
  Synthetic Polypeptide
  MISC_FEATURE: Glucagon analogue
  MOD_RES (1)..(1): N-terminal amino group replaced with hydroxy group
  MISC_FEATURE (11)..(11): Xaa is Ser or Glu
FTSDYSKYLDXRRAQDFVEWLMKT

SEQ ID NO: 1409 - protein, 24 aa, Artificial Sequence
  Synthetic Polypeptide
  MISC_FEATURE: Glucagon analogue
  MOD_RES (1)..(1): N-terminal amino group replaced with hydroxy group
  MISC_FEATURE (7)..(7): Xaa at position 7 is Lys or Glu
  MISC_FEATURE (10)..(10): Xaa is Asp, Glu, homoglutamic acid, cysteic acid or homocysteic acid
  MISC_FEATURE (11)..(11): Xaa is Ala, Ser, Glu, Lys, homoglutamic acid or homocysteic acid
  MISC_FEATURE (15)..(15): Xaa is Gln, Glu or Lys
  MISC_FEATURE (19)..(19): Xaa is Ala, Gln, Lys or Glu
  MISC_FEATURE (23)..(23): Xaa is Asn, Lys or an acidic amino acid
  MISC_FEATURE (24)..(24): Xaa is Thr or an acidic amino acid
FTSDYSXYLXXRRAXDFVXWLMXX

SEQ ID NO: 1410 - protein, 24 aa, Artificial Sequence
  Synthetic Polypeptide
  MISC_FEATURE: Glucagon analogue
  MOD_RES (1)..(1): N-terminal amino group replaced with hydroxy group
  MISC_FEATURE (11)..(11): Xaa is Ala, Ser, Glu, Gln, homoglutamic acid or homocysteic acid
  MISC_FEATURE (15)..(15): Xaa is Gln or Lys
  MISC_FEATURE (19)..(19): Xaa is Ala, Gln or Glu
  MISC_FEATURE (23)..(23): Xaa is Asn, Lys or an acidic amino acid
FTSDYSKYLDXRRAXDFVXWLMXT

SEQ ID NO: 1411 - protein, 24 aa, Artificial Sequence
  Synthetic Polypeptide
  MISC_FEATURE: Glucagon analogue
  MOD_RES (1)..(1): N-terminal amino group replaced with hydroxy group
  MISC_FEATURE (11)..(11): Xaa is Ala, Ser, Glu, Gln, homoglutamic acid or homocysteic acid
  MISC_FEATURE (15)..(15): Xaa is Gln or Lys
FTSDYSKYLDXRRAXDFVQWLMNT

SEQ ID NO: 1412 - protein, 24 aa, Artificial Sequence
  Synthetic Polypeptide
  MISC_FEATURE: Glucagon analogue
  MOD_RES (1)..(1): N-terminal amino group replaced with hydroxy group
  MISC_FEATURE (4)..(4): Xaa is aspartic acid, glutamic acid, cysteic acid or homocysteic acid
  MISC_FEATURE (7)..(7): Xaa is Lys or Arg
  MISC_FEATURE (15)..(15): Xaa is Lys or Gln
  MISC_FEATURE (16)..(16): Xaa is Lys, Cys, Orn, homocysteine or acetyl phenyalanine
  MOD_RES (16)..(16): Pegylated
  MISC_FEATURE (19)..(19): Xaa is Lys, Cys, Orn, homocysteine or acetyl phenylalanine
  MOD_RES (19)..(19): Pegylated
  MISC_FEATURE (22)..(22): Xaa is Met, Leu or Nle
FTSXYSXYLDERRAXXFVXWLXNT

SEQ ID NO: 1413 - protein, 24 aa, Artificial Sequence
  Synthetic Polypeptide
  MISC_FEATURE: Glucagon analogue
  MOD_RES (1)..(1): N-terminal amino group replaced with hydroxy group
  MISC_FEATURE (4)..(4): Xaa is aspartic acid, glutamic acid, cysteic acid or homocysteic acid
  MISC_FEATURE (15)..(15): Xaa is Lys or Gln
  MISC_FEATURE (16)..(16): Xaa is Cys, Orn, homocysteine or acetyl phenyalanine
  MOD_RES (16)..(16): Pegylated
  MISC_FEATURE (22)..(22): Xaa is Met, Leu or Nle
FTSXYSKYLDERRAXXFVQWLXNT

SEQ ID NO: 1414 - protein, 24 aa, Artificial Sequence
  Synthetic Polypeptide
  MISC_FEATURE: Glucagon analogue
  MOD_RES (1)..(1): N-terminal amino group replaced with hydroxy group
  MISC_FEATURE (4)..(4): Xaa is aspartic acid, glutamic acid, cysteic acid or homocysteic acid
  MISC_FEATURE (15)..(15): Xaa is Lys or Gln
  MISC_FEATURE (19)..(19): Xaa is Cys, Orn, homocysteine or acetyl phenylalanine
  MOD_RES (19)..(19): Pegylated
  MISC_FEATURE (22)..(22): Xaa is Met, Leu or Nle
FTSXYSKYLDERRAXDFVXWLXNT

SEQ ID NO: 1415 - protein, 24 aa, Artificial Sequence
  Synthetic Polypeptide
  MISC_FEATURE: Glucagon analogue
  MOD_RES (1)..(1): N-terminal amino group replaced with hydroxy group
  MISC_FEATURE (4)..(4): Xaa is aspartic acid, glutamic acid, cysteic acid, homoglutamic acid or homocysteic acid
  MISC_FEATURE (7)..(7): Xaa is Lys or Glu
  MISC_FEATURE (10)..(10): Xaa is Asp, Glu, cysteic acid, homoglutamic acid or homocysteic acid
  MISC_FEATURE (11)..(11): Xaa is Ala, Ser, Glu, Lys Gln, homoglutamic acid or homocysteic acid
  MISC_FEATURE (15)..(15): Xaa is Arg, Gln, Glu or Lys
  MISC_FEATURE (19)..(19): Xaa is Ala, Gln, Lys or Glu
  MISC_FEATURE (22)..(22): Xaa is Met, Leu or Nle
  MISC_FEATURE (23)..(23): Xaa is Asn, Lys or an acidic amino acid
  MISC_FEATURE (24)..(24): Xaa is Thr or an acidic amino acid
FTSXYSXYLXXRRAXDFVXWLXXX

SEQ ID NO: 1416 - protein, 24 aa, Artificial Sequence
  Synthetic Polypeptide
  MISC_FEATURE: Glucagon analogue
  MOD_RES (1)..(1): N-terminal amino group replaced with hydroxy group
  MISC_FEATURE (7)..(11): Lactam bridge connecting residues 7 and 11
  MISC_FEATURE (10)..(10): Xaa is Glu or Asp
  MISC_FEATURE (22)..(22): Xaa is Met, Leu or Nle
  MISC_FEATURE (23)..(23): Xaa is Asn, Asp or Glu
  MOD_RES (24)..(24): C-terminal alpha carboxylate replaced with amide
FTSDYSKYLXERRAQDFVQWLXXT

SEQ ID NO: 1417 - protein, 24 aa, Artificial Sequence
  Synthetic Polypeptide
  MISC_FEATURE: Glucagon analogue
  MOD_RES (1)..(1): N-terminal amino group replaced with hydroxy group
  MISC_FEATURE (10)..(10): Xaa is Asp or Glu
  MISC_FEATURE (11)..(15): Lactam bridge connecting residues 11 and 15
  MISC_FEATURE (22)..(22): Xaa is Met, Leu or Nle
  MISC_FEATURE (23)..(23): Xaa is Asn, Asp or Glu
  MOD_RES (24)..(24): C-terminal alpha carboxylate replaced with amide
FTSDYSKYLXERRAKDFVQWLXXT

SEQ ID NO: 1418 - protein, 24 aa, Artificial Sequence
  Synthetic Polypeptide
  MISC_FEATURE: Glucagon analogue
  MOD_RES (1)..(1): N-terminal amino group replaced with hydroxy group
  MISC_FEATURE (10)..(10): Xaa is Asp or Glu
  MISC_FEATURE (11)..(11): Xaa is Ser or Glu
  MISC_FEATURE (15)..(19): Lactam bridge connecting residues 15 and 19
  MISC_FEATURE (22)..(22): Xaa is Met, Leu or Nle
  MISC_FEATURE (23)..(23): Xaa is Asn, Asp or Glu
  MOD_RES (24)..(24): C-terminal alpha carboxylate replaced with amide
FTSDYSKYLXXRRAKDFVEWLXXT

SEQ ID NO: 1419 - protein, 24 aa, Artificial Sequence
  Synthetic Polypeptide
  MISC_FEATURE: Glucagon analogue
  MOD_RES (1)..(1): N-terminal amino group replaced with hydroxy group
  MISC_FEATURE (10)..(10): Xaa is Asp or Glu
  MISC_FEATURE (11)..(11): Xaa is Ser or Glu
  MISC_FEATURE (19)..(23): Lactam bridge connecting residues 19 and 23
  MISC_FEATURE (22)..(22): Xaa is Met, Leu or Nle
  MISC_FEATURE (24)..(24): Xaa is Thr or Glu
  MOD_RES (24)..(24): C-terminal alpha carboxylate replaced with amide
FTSDYSKYLXXRRAQDFVEWLXKX

SEQ ID NO: 1420 - protein, 24 aa, Artificial Sequence
  Synthetic Polypeptide
  MISC_FEATURE: Glucagon analogue
  MOD_RES (1)..(1): N-terminal amino group replaced with hydroxy group
  MISC_FEATURE (4)..(4): Xaa is aspartic acid, glutamic acid, cysteic acid or homocysteic acid
  MISC_FEATURE (7)..(7): Xaa is Lys or Glu
  MISC_FEATURE (10)..(10): Xaa is Asp, Glu, cysteic acid, homoglutamic acid or homocysteic acid
  MISC_FEATURE (11)..(11): Xaa is Ala, Ser, Glu, Lys Gln, homoglutamic acid or homocysteine
  MISC_FEATURE (15)..(15): Xaa is Arg, Gln, Glu or Lys
  MISC_FEATURE (19)..(19): Xaa is Ala, Gln, Lys or Glu
  MISC_FEATURE (22)..(22): Xaa is Met, Leu or Nle
  MISC_FEATURE (23)..(23): Xaa is Asn, Lys, Asp, Glu, cysteic acid or homocysteic acid
  MISC_FEATURE (24)..(24): Xaa is Thr, Asp, Glu, cysteic acid and homocysteic acid
FTSXYSXYLXXRRAXDFVXWLXXX

SEQ ID NO: 1421 - protein, 10 aa, Artificial Sequence
  Synthetic Polypeptide
  MISC_FEATURE: Peptide fragment representing the carboxy terminal 10 amino acids of Exendin-4
GPSSGAPPPS

SEQ ID NO: 1422 - protein, 24 aa, Artificial Sequence
  Synthetic Polypeptide
  MISC_FEATURE: Glucagon analogue
  MOD_RES (1)..(1): N-terminal amino group replaced with hydroxy group
  MISC_FEATURE (4)..(4): Xaa is aspartic acid, glutamic acid, cysteic acid or homocysteic acid
  MISC_FEATURE (7)..(11): Lactam bridge connecting residues 7 and 11
  MISC_FEATURE (10)..(10): Xaa is Asp, Glu, cysteic acid, homoglutamic acid and homocysteic acid
  MISC_FEATURE (22)..(22): Xaa is Met, Leu or Nle
FTSXYSKYLXERRAQDFVQWLXNT

SEQ ID NO: 1423 - protein, 24 aa, Artificial Sequence
  Synthetic Polypeptide
  MISC_FEATURE: Glucagon analogue
  MOD_RES (1)..(1): N-terminal amino group replaced with hydroxy group
  MISC_FEATURE (4)..(4): Xaa is aspartic acid, glutamic acid, cysteic acid or homocysteic acid
  MISC_FEATURE (10)..(10): Xaa is Asp, Glu, cysteic acid, homoglutamic acid and homocysteic acid
  MISC_FEATURE (11)..(15): Lactam bridge connecting residues 11 and 15
  MISC_FEATURE (22)..(22): Xaa is Met, Leu or Nle
FTSXYSKYLXERRAKDFVQWLXNT

SEQ ID NO: 1424 - protein, 24 aa, Artificial Sequence
  Synthetic Polypeptide
  MISC_FEATURE: Glucagon analogue
  MOD_RES (1)..(1): N-terminal amino group replaced with hydroxy group
  MISC_FEATURE (4)..(4): Xaa is aspartic acid, glutamic acid, cysteic acid or homocysteic acid
  MISC_FEATURE (10)..(10): Xaa is Asp, Glu, cysteic acid, homoglutamic acid and homocysteic acid
  MISC_FEATURE (15)..(19): Lactam bridge connecting residues 15 and 19
  MISC_FEATURE (22)..(22): Xaa is Met, Leu or Nle
FTSXYSKYLXERRAKDFVEWLXNT

SEQ ID NO: 1425 - protein, 24 aa, Artificial Sequence
  Synthetic Polypeptide
  MISC_FEATURE: Glucagon analogue
  MOD_RES (1)..(1): N-terminal amino group replaced with hydroxy group
  MISC_FEATURE (4)..(4): Xaa is aspartic acid, glutamic acid, cysteic acid or homocysteic acid
  MISC_FEATURE (10)..(10): Xaa is Asp, Glu, cysteic acid, homoglutamic acid and homocysteic acid
  MISC_FEATURE (19)..(24): Lactam bridge connecting residues 19 and 24
  MISC_FEATURE (22)..(22): Xaa is Met, Leu or Nle
FTSXYSKYLXERRAQDFVEWLXKT

SEQ ID NO: 1426 - protein, 8 aa, Artificial Sequence
  Synthetic Polypeptide
  MISC_FEATURE: Peptide fragment representing the carboxy terminal 8 amino acids of oxyntomodulin
KRNRNNIA

SEQ ID NO: 1427 - protein, 4 aa, Artificial Sequence
  Synthetic Polypeptide
  MISC_FEATURE: Peptide fragment representing the carboxy 4 amino acids of oxyntomodulin carboxy terminus
KRNR

SEQ ID NO: 1428 - protein, 34 aa, Artificial Sequence
  Synthetic Polypeptide
  MISC_FEATURE: Glucagon analogue
FTSEYSKYLDERRAQDFVQWLMNTGPSSGAPPPS

SEQ ID NO: 1429 - protein, 34 aa, Artificial Sequence; identical to SEQ ID NO: 1428
  Synthetic Polypeptide
  MISC_FEATURE (7)..(11): Lactam bridge connecting residues 7 and 11

SEQ ID NO: 1430 - protein, 34 aa, Artificial Sequence
  Synthetic Polypeptide
  MISC_FEATURE: Glucagon analogue
  MISC_FEATURE (11)..(15): Lactam bridge connecting residues 11 and 15
FTSEYSKYLDERRAKDFVQWLMNTGPSSGAPPPS

SEQ ID NO: 1431 - protein, 34 aa, Artificial Sequence
  Synthetic Polypeptide
  MISC_FEATURE: Glucagon analogue
  MISC_FEATURE (7)..(11): Lactam bridge connecting residues 7 and 11
FTSDYSKYLDERRAQDFVQWLMNTGPSSGAPPPS

SEQ ID NO: 1432 - protein, 34 aa, Artificial Sequence; identical to SEQ ID NO: 1428
  Synthetic Polypeptide
  MISC_FEATURE: Glucagon analogue
  MOD_RES (1)..(1): N-terminal amino group replaced with hydroxy group
  MISC_FEATURE (7)..(11): Lactam bridge connecting residues 7 and 11

SEQ ID NO: 1433 - protein, 34 aa, Artificial Sequence; identical to SEQ ID NO: 1430
  Synthetic Polypeptide
  MISC_FEATURE: Glucagon analogue
  MOD_RES (1)..(1): N-terminal amino group replaced with hydroxy group
  MISC_FEATURE (11)..(15): Lactam bridge connecting residues 11 and 15

SEQ ID NO: 1434 - protein, 24 aa, Artificial Sequence
  Synthetic Polypeptide
  MISC_FEATURE: Glucagon analogue
  MOD_RES (1)..(1): N-terminal amino group replaced with hydroxy group
FTSDYSKYLDSRRAQDFVQWLMDT

SEQ ID NO: 1435 - protein, 24 aa, Artificial Sequence
  Synthetic Polypeptide
  MISC_FEATURE: Glucagon analogue
  MOD_RES (1)..(1): N-terminal amino group replaced with hydroxy group
  MISC_FEATURE (7)..(11): Lactam bridge connecting residues 7 and 11
FTSEYSKYLDERRAQDFVQWLMNT

SEQ ID NO: 1436 - protein, 24 aa, Artificial Sequence
  Synthetic Polypeptide
  MISC_FEATURE: Glucagon analogue
  MOD_RES (1)..(1): N-terminal amino group replaced with hydroxy group
  MISC_FEATURE (11)..(15): Lactam bridge connecting residues 11 and 15
FTSEYSKYLDERRAKDFVQWLMNT

SEQ ID NO: 1437 - protein, 31 aa, Artificial Sequence
  Synthetic Polypeptide
  MISC_FEATURE: Glucagon analogue
HSQGTFTSDYARYLDARRAREFIKWLVRGRG

SEQ ID NO: 1438 - protein, 24 aa, Artificial Sequence
  Synthetic Polypeptide
  MISC_FEATURE: Glucagon analogue
  MOD_RES (1)..(1): N-terminal amino group replaced with hydroxy group
  MOD_RES (24)..(24): C-terminal alpha carboxylate replaced with amide
FTSDYSKYLDERRAQDFVQWLMNT

SEQ ID NO: 1439 - protein, 24 aa, Artificial Sequence
  Synthetic Polypeptide
  MISC_FEATURE: Glucagon analogue
  MOD_RES (1)..(1): N-terminal amino group replaced with hydroxy group
  MISC_FEATURE (4)..(4): Xaa is aspartic acid, glutamic acid, cysteic acid or homocysteic acid
  MISC_FEATURE (10)..(10): Xaa is Asp, Glu, cysteic acid, homoglutamic acid or homocysteic acid
  MISC_FEATURE (22)..(22): Xaa is Met, Leu or Nle
  MOD_RES (24)..(24): C-terminal alpha carboxylate replaced with amide
FTSXYSKYLXERRAKDFVQWLXNT

SEQ ID NO: 1440 - protein, 29 aa, Artificial Sequence
  Synthetic Polypeptide
  MISC_FEATURE: Glucagon analogue
HSQGTFTSDYSKYLDSCRAQDFVQWLMNT

SEQ ID NO: 1441 - protein, 39 aa, Artificial Sequence; identical to SEQ ID NO: 36
  Synthetic Polypeptide
  MISC_FEATURE: Glucagon Analogue

SEQ ID NO: 1442 - protein, 29 aa, Artificial Sequence
  Synthetic Polypeptide
  MISC_FEATURE: Glucagon analogue
  MOD_RES (24)..(24): 2-butyrolactone bound through thiol group of Cysteine
HSQGTFTSDYSKYLDSRRAQCFVQWLMNT

SEQ ID NO: 1443 - protein, 29 aa, Artificial Sequence
  Synthetic Polypeptide
  MISC_FEATURE: Glucagon Analogue
  MOD_RES (21)..(21): Carboxymethyl group bound through thiol group of Cysteine
HSQGTFTSDYSKYLDSRRAQCFVQWLMNT

SEQ ID NO: 1444 - protein, 39 aa, Homo sapiens
HSQGTFTSDYSRYLDSRRAQDFVQWLRNTGPSSGAPPPS

SEQ ID NO: 1445 - protein, 35 aa, Artificial Sequence; identical to SEQ ID NO: 1346
  Synthetic Polypeptide
  MISC_FEATURE: Glucagon analogue
  MOD_RES (1)..(1): N-terminal amino group replaced with hydroxy group
  MISC_FEATURE (4)..(4): Xaa is aspartic acid, glutamic acid, cysteic acid or homocysteic acid
  MISC_FEATURE (7)..(11): Lactam bridge connecting residues 7 and 11
  MISC_FEATURE (10)..(10): Xaa is Asp, Glu, cysteic acid, homoglutamic acid or homocysteic acid
  MISC_FEATURE (22)..(22): Xaa is Met, Leu or Nle
  MISC_FEATURE (23)..(23): Xaa is Asn, Lys, Asp, Glu, cysteic acid and homocysteic acid
  MISC_FEATURE (24)..(24): Xaa is Thr, Asp, Glu, cysteic acid and homocysteic acid
  MISC_FEATURE (25)..(25): Xaa is Cys, Orn, homocysteine or acetyl phenyalanine
  MOD_RES (25)..(25): Pegylated

SEQ ID NO: 1446 - protein, 35 aa, Artificial Sequence; identical to SEQ ID NO: 1347
  Synthetic Polypeptide
  MISC_FEATURE: Glucagon analogue
  MOD_RES (1)..(1): N-terminal amino group replaced with hydroxy group
  MISC_FEATURE (4)..(4): Xaa is aspartic acid, glutamic acid, cysteic acid or homocysteic acid
  MISC_FEATURE (10)..(10): Xaa is Asp, Glu, cysteic acid, homoglutamic acid or homocysteic acid
  MISC_FEATURE (11)..(15): Lactam bridge connecting residues 11 and 15
  MISC_FEATURE (22)..(22): Xaa is Met, Leu or Nle
  MISC_FEATURE (23)..(23): Xaa is Asn, Lys, Asp, Glu, cysteic acid and homocysteic acid
  MISC_FEATURE (24)..(24): Xaa is Thr, Asp, Glu, cysteic acid and homocysteic acid
  MISC_FEATURE (35)..(35): Xaa is Cys, Orn, homocysteine or acetyl phenyalanine
  MOD_RES (35)..(35): Pegylated

SEQ ID NO: 1447 - protein, 24 aa, Artificial Sequence
  Synthetic Polypeptide
  MISC_FEATURE: Glucagon analogue
  MISC_FEATURE (4)..(4): Xaa is glutamic acid, homoglutamic acid, cysteic acid or homocysteic acid
  MISC_FEATURE (7)..(11): Lactam bridge connecting residues 7 and 11
  MISC_FEATURE (10)..(10): Xaa is Glu or Asp
  MISC_FEATURE (22)..(22): Xaa is Met, Leu or Nle
  MISC_FEATURE (23)..(23): Xaa is Asn, Asp or Glu
FTSXYSKYLXERRAQDFVQWLXXT

SEQ ID NO: 1448 - protein, 24 aa, Artificial Sequence
  Synthetic Polypeptide
  MISC_FEATURE: Glucagon analogue
  MISC_FEATURE (4)..(4): Xaa is glutamic acid, homoglutamic acid,  cysteic acid or homocysteic acid
  MISC_FEATURE (10)..(10): Xaa is Asp or Glu
  MISC_FEATURE (11)..(15): Lactam bridge connecting residues 11 and 15
  MISC_FEATURE (22)..(22): Xaa is Met, Leu or Nle
  MISC_FEATURE (23)..(23): Xaa is Asn, Asp or Glu
FTSXYSKYLXERRAKDFVQWLXXT

SEQ ID NO: 1449 - protein, 23 aa, Artificial Sequence
  Synthetic Polypeptide
  MISC_FEATURE: Glucagon analogue
TSDYSKYLDERRAKDFVQWLMDT

SEQ ID NO: 1450 - protein, 11 aa, Artificial Sequence
  Synthetic Polypeptide
  MISC_FEATURE: Peptide fragment representing the carboxy terminal 10 amino acids of Exendin-4 plus one additional amino acid
  MISC_FEATURE (11)..(11): Xaa is selected form the group consisting of Cys, Orn, Lys, homocysteine and acetyl phenyalanine
GPSSGAPPPSX

SEQ ID NO: 1451 - protein, 24 aa, Artificial Sequence
  Synthetic Polypeptide
  MISC_FEATURE: Glucagon analogue
  MOD_RES (1)..(1): N-terminal amino group replaced with hydroxy group
  MISC_FEATURE (4)..(4): Xaa is aspartic acid, glutamic acid, cysteic acid, homoglutamic acid or homocysteic acid
  MISC_FEATURE (7)..(7): Xaa is Lys or Glu
  MISC_FEATURE (10)..(10): Xaa is Asp, Glu, cysteic acid, homoglutamic acid or homocysteic acid
  MISC_FEATURE (11)..(11): Xaa is Ala, Ser, Glu, Lys Gln, homoglutamic acid or homocysteic acid
  MISC_FEATURE (15)..(15): Xaa is Arg, Gln, Glu or Lys
  MISC_FEATURE (19)..(19): Xaa is Ala, Gln, Lys or Glu
  MISC_FEATURE (22)..(22): Xaa is Met, Leu or Nle
  MISC_FEATURE (23)..(23): Xaa is Asn, Lys or an acidic amino acid
  MISC_FEATURE (24)..(24): Xaa is Thr, Gly or an acidic amino acid
FTSXYSXYLXXRRAXDFVXWLXXX

SEQ ID NO: 1452 - protein, 6 aa, Artificial Sequence
  Synthetic Polypeptide
  MISC_FEATURE (6)..(6): Xaa is phenyl lactic acid
HSQGTX

SEQ ID NO: 1453 - protein, 5 aa, Artificial Sequence
  Synthetic Polypeptide
  MISC_FEATURE (5)..(5): Xaa is phenyl lactic acid
SQGTX

SEQ ID NO: 1454 - protein, 4 aa, Artificial Sequence
  Synthetic Polypeptide
  MISC_FEATURE (4)..(4): Xaa is phenyl lactic acid
QGTX

SEQ ID NO: 1455 - protein, 3 aa, Artificial Sequence
  Synthetic Polypeptide
  MISC_FEATURE (3)..(3): Xaa is phenyl lactic acid
GTX

SEQ ID NO: 1456 - protein, 2 aa, Artificial Sequence
  Synthetic Polypeptide
  MISC_FEATURE (2)..(2): Xaa is phenyl lactic acid
TX

SEQ ID NO: 1457 - protein, 6 aa, Artificial Sequence
  Synthetic Polypeptide
  MISC_FEATURE (1)..(1): Xaa is selected from a group consisting of His, D-histidine, alpha, alpha-dimethyl imidiazole acetic acid (DMIA), N-methyl histidine, alpha-methyl histidine, imidazole acetic acid, desaminohistidine, hydroxyl-histidine, acetyl-histidine and
  MISC_FEATURE (2)..(2): Xaa is selected from a group consisting of Ser, D-serine, D-alanine, Val, Gly, N-methyl serine, N-methyl alanine, and aminoisobutyric acid (AIB)
  MISC_FEATURE (3)..(3): Xaa is selected from a group consisting of Glu or Gln
  MISC_FEATURE (6)..(6): Xaa is phenyl lactic acid
XXXGTX

SEQ ID NO: 1458 - protein, 5 aa, Artificial Sequence
  Synthetic Polypeptide
  MISC_FEATURE (1)..(1): Xaa is selected from a group consisting of Ser, D-serine, D-alanine, Val, Gly, N-methyl serine, N-methyl alanine, and aminoisobutyric acid (AIB)
  MISC_FEATURE (2)..(2): Xaa is selected from a group consisting of Glu or Gln
  MISC_FEATURE (5)..(5): Xaa is phenyl lactic acid
XXGTX

SEQ ID NO: 1459 - protein, 4 aa, Artificial Sequence
  Synthetic Polypeptide
  MISC_FEATURE (1)..(1): Xaa is selected from a group consisting of Glu or Gln
  MISC_FEATURE (4)..(4): Xaa is phenyl lactic acid
XGTX

SEQ ID NO: 1460 - protein, 24 aa, Artificial Sequence
  Synthetic Polypeptide
  MOD_RES (1)..(1): N-terminal amino group replaced with hydroxy group
  MISC_FEATURE (11)..(15): Lactam bridge connecting residues 11 and 15
  MOD_RES (24)..(24): C-terminal alpha carboxylate replaced with amide
FTSDYSKYLDERRAKDFVQWLMDT

SEQ ID NO: 1461 - protein, 24 aa, Artificial Sequence
  Synthetic Polypeptide
  MOD_RES (1)..(1): N-terminal amino group replaced with hydroxy group
  MOD_RES (24)..(24): C-terminal alpha carboxylate replaced with amide
FTSEYSKYLDSRRAQDFVQWLMNT

SEQ ID NO: 1462 - protein, 24 aa, Artificial Sequence
  Synthetic Polypeptide
  MOD_RES (1)..(1): N-terminal amino group replaced with hydroxy group
  MISC_FEATURE (4)..(7): Lactam bridge connecting residues 4 and 7
  MOD_RES (24)..(24): C-terminal alpha carboxylate replaced with amide
FTSEYSKYLDSRRAQDFVQWLMNT

SEQ ID NO: 1463 - protein, 28 aa, Artificial Sequence
  Synthetic Polypeptide
  MISC_FEATURE (15)..(19): Lactam bridge connecting residues 15 and 19
  MOD_RES (28)..(28): C-terminal alpha carboxylate replaced with amide
AEGTFTSEYSKYLDERRAKDFVQWLMDT

SEQ ID NO: 1464 - protein, 28 aa, Artificial Sequence
  Synthetic Polypeptide
  MISC_FEATURE (4)..(5): Threonine in position 4 and phenyl lactic acid in position 5 are linked via ester bond
  MISC_FEATURE (5)..(5): Xaa is phenyl lactic acid
  MISC_FEATURE (15)..(19): Lactam bridge connecting residues 15 and 19
  MOD_RES (28)..(28): C-terminal alpha carboxylate replaced with amide
AEGTXTSDYSKYLDERRAKDFVQWLMDT

SEQ ID NO: 1465 - protein, 28 aa, Artificial Sequence
  Synthetic Polypeptide
  MISC_FEATURE (15)..(19): Lactam bridge connecting residues 15 and 19
  MOD_RES (28)..(28): C-terminal alpha carboxylate replaced with amide
SQGTFTSEYSKYLDERRAKDFVQWLMDT

SEQ ID NO: 1466 - protein, 28 aa, Artificial Sequence
  Synthetic Polypeptide
  MISC_FEATURE (4)..(5): Threonine in position 4 and phenyl lactic acid in position 5 are linked via ester bond
  MISC_FEATURE (5)..(5): Xaa is phenyl lactic acid
  MISC_FEATURE (15)..(19): Lactam bridge connecting residues 15 and 19
  MOD_RES (28)..(28): C-terminal alpha carboxylate replaced with amide
SQGTXTSDYSKYLDERRAKDFVQWLMDT

SEQ ID NO: 1467 - protein, 24 aa, Artificial Sequence
  Synthetic Polypeptide
  MOD_RES (1)..(1): N-terminal amino group replaced with hydroxy group
  MISC_FEATURE (5)..(5): Covalently linked to a cholesterol acid moiety
  MISC_FEATURE (11)..(15): Lactam bridge connecting residues 11 to 15
  MOD_RES (24)..(24): C-terminal alpha carboxylate replaced with amide
FTSDKSKYLDERRAKDFVQWLMDT

SEQ ID NO: 1468 - protein, 25 aa, Artificial Sequence
  Synthetic Polypeptide
  MOD_RES (1)..(1): N-terminal amino group replaced with hydroxy group
  MISC_FEATURE (11)..(15): Lactam bridge connecting residues 11 and 15
  MISC_FEATURE (25)..(25): Covalently linked to a cholesterol acid moiety
  MOD_RES (25)..(25): C-terminal alpha carboxylate replaced with amide
FTSDYSKYLDERRAKDFVQWLMDTK

SEQ ID NO: 1469 - protein, 35 aa, Artificial Sequence
  Synthetic Polypeptide
  MOD_RES (1)..(1): N-terminal amino group replaced with hydroxy group
  MISC_FEATURE (11)..(15): Lactam bridge connectiong residues 11 and 15
  MISC_FEATURE (35)..(35): Covalently linked to a cholesterol acid moiety
  MOD_RES (35)..(35): C-terminal alpha carboxylate replaced with amide
FTSDYSKYLDERRAKDFVQWLMDTGPSSGAPPPSK

SEQ ID NO: 1470 - protein, 28 aa, Artificial Sequence
  Synthetic Polypeptide
  MISC_FEATURE (1)..(1): Xaa is amino isobutyric acid
  MISC_FEATURE (4)..(5): Threonine in position 4 and phenyl lactic acid in position 5 are linked via ester bond
  MISC_FEATURE (5)..(5): Xaa is phenyl lactic acid
  MISC_FEATURE (15)..(19): Lactam bridge connectiong residues 15 and 19
  MOD_RES (28)..(28): C-terminal alpha carboxylate replaced with amide
XEGTXTSDYSKYLDERRAKDFVQWLMDT

SEQ ID NO: 1471 - protein, 34 aa, Artificial Sequence; identical to SEQ ID NO: 1428
  Synthetic Polypeptide
  MOD_RES (34)..(34): C-terminal alpha carboxylate replaced with amide

SEQ ID NO: 1472 - protein, 34 aa, Artificial Sequence; identical to SEQ ID NO: 1428
  Synthetic Polypeptide
  MOD_RES (1)..(1): N-terminal amino group replaced with hydroxy group
  MOD_RES (34)..(34): C-terminal alpha carboxylate replaced with amide

SEQ ID NO: 1473 - protein, 34 aa, Artificial Sequence; identical to SEQ ID NO: 1430
  Synthetic Polypeptide
  MISC_FEATURE (11)..(15): Lactam bridge connecting residues 11 and 15
  MOD_RES (34)..(34): C-terminal alpha carboxylate replaced with amide

SEQ ID NO: 1474 - protein, 34 aa, Artificial Sequence; identical to SEQ ID NO: 1430
  Synthetic Polypeptide
  MOD_RES (1)..(1): N-terminal amino group replaced with hydroxy group
  MISC_FEATURE (11)..(15): Lactam bridge connecting residues 11 and 15
  MOD_RES (34)..(34): C-termincal alpha carboxylate replaced with amide

SEQ ID NO: 1475 - protein, 24 aa, Artificial Sequence
  Synthetic Polypeptide
  MOD_RES (1)..(1): N-terminal amino group replaced with hydroxy group
  MISC_FEATURE (7)..(11): Lactam bridge connecting residues 7 and 11
  MOD_RES (24)..(24): C-terminal alpha carboxylate replaced with amide
FTSDYSKYLDERRAQDFVQWLMDT

SEQ ID NO: 1476 - protein, 24 aa, Artificial Sequence
  Synthetic Polypeptide
  MOD_RES (1)..(1): N-terminal amino group replaced with hydroxy group
  MISC_FEATURE (11)..(15): Lactam bridge connecting residues 11 and 15
  MOD_RES (24)..(24): C-terminal alpha carboxylate replaced with amide
FTSDYSKYLDERRAKDFVQWLMDT

SEQ ID NO: 1477 - protein, 24 aa, Artificial Sequence
  Synthetic Polypeptide
  MOD_RES (1)..(1): N-terminal amino group replaced with hydroxy group
  MISC_FEATURE (15)..(19): Lactam bridge connecting residues 15 and 19
  MOD_RES (24)..(24): C-terminal alpha carboxylate replaced with amide
FTSDYSKYLDERRAKDFVEWLMDT

SEQ ID NO: 1478 - protein, 24 aa, Artificial Sequence
  Synthetic Polypeptide
  MOD_RES (1)..(1): N-terminal amino group replaced with hydroxy group
  MISC_FEATURE (19)..(23): Lactam bridge connecting residues 19 and 23
  MOD_RES (24)..(24): C-terminal alpha carboxylate replaced with amide
FTSDYSKYLDERRAQDFVEWLMKT

SEQ ID NO: 1479 - protein, 24 aa, Artificial Sequence
  Synthetic Polypeptide
  MOD_RES (1)..(1): N-terminal amino group replaced with hydroxy group
  MISC_FEATURE (7)..(11): Lactam bridge connecting residues 7 and 11
  MOD_RES (24)..(24): C-terminal alpha carboxylate replaced with amide
FTSDYSKYLDEQAAKDFIAWLMDT

SEQ ID NO: 1480 - protein, 24 aa, Artificial Sequence
  Synthetic Polypeptide
  MOD_RES (1)..(1): N-terminal amino group replaced with hydroxy group
  MISC_FEATURE (11)..(15): Lactam bridge connecting residues 11 and 15
  MOD_RES (24)..(24): C-terminal alpha carboxylate replaced with amide
FTSDYSKYLDEQAAKEFIAWLMDT

SEQ ID NO: 1481 - protein, 28 aa, Artificial Sequence
  Synthetic Polypeptide
  MISC_FEATURE (15)..(19): Lactam bridge connecting residues 15 and 19
  MOD_RES (28)..(28): C-terminal alpha carboxylate replaced with amide
AEGTFTSEYSKYLDERRAKDFVQWLMDT

SEQ ID NO: 1482 - protein, 28 aa, Artificial Sequence
  Synthetic Polypeptide
  MISC_FEATURE (15)..(19): Lactam bridge connecting residues 15 and 19
  MOD_RES (28)..(28): C-terminal alpha carboxylate replaced with amide
AEGTFTSEYSKYLDEQAAKEFIAWLMDT

SEQ ID NO: 1483 - protein, 29 aa, Artificial Sequence
  Synthetic Polypeptide
  MISC_FEATURE (16)..(20): Lactam bridge connection residues 16 and 20
  MOD_RES (29)..(29): C-terminal alpha carboxylate replaced with amide
HAEGTFTSEYSKYLDERRAKDFVQWLMDT

SEQ ID NO: 1484 - protein, 29 aa, Artificial Sequence
  Synthetic Polypeptide
  MISC_FEATURE (16)..(20): Lactam bridge connecting bridges 16 and 20
  MOD_RES (29)..(29): C-terminal alpha carboxylate replaced with amide
HAEGTFTSEYSKYLDEQAAKEFIAWLMDT

SEQ ID NO: 1485 - protein, 26 aa, Artificial Sequence
  Synthetic Polypeptide
  MISC_FEATURE (13)..(17): Lactam bridge connecting residues 13 and 17
  MOD_RES (26)..(26): C-terminal alpha carboxylate replaced with amide
GTFTSEYSKYLDERRAKDFVQWLMDT

SEQ ID NO: 1486 - protein, 28 aa, Artificial Sequence
  Synthetic Polypeptide
  MISC_FEATURE (5)..(6): Threonine in position 5 and phenyl lactic acid in position 6 linked via ester bond
  MISC_FEATURE (15)..(19): Lactam bridge connecting residues 15 and 19
  MOD_RES (28)..(28): C-terminal alpha carboxylate replaced with amide
SQGTFTSEYSKYLDERRAKDFVQWLMDT

SEQ ID NO: 1487 - protein, 29 aa, Artificial Sequence
  Synthetic Polypeptide
  MISC_FEATURE (5)..(6): Threonine at position 5 and phenyl lactic acid at position 6 linked via ester bond
  MISC_FEATURE (6)..(6): Xaa is phenyl lactic acid
  MISC_FEATURE (16)..(20): Lactam bridge connecting residues 16 and 20
  MOD_RES (29)..(29): C-terminal alpha carboxylate replaced with amide
HAEGTXTSDYSKYLDERRAKDFVQWLMDT

SEQ ID NO: 1488 - protein, 24 aa, Artificial Sequence
  Synthetic Polypeptide
  MOD_RES (1)..(1): N-terminal amino group replaced with hydroxy group
  MISC_FEATURE (7)..(11): Lactam bridge connecting residues 7 and 11
  MOD_RES (19)..(19): Pegylated
  MOD_RES (24)..(24): C-terminal alpha carboxylate replaced with amide
FTSDYSKYLDERRAQDFVCWLMDT

SEQ ID NO: 1489 - protein, 35 aa, Artificial Sequence
  Synthetic Polypeptide
  MOD_RES (1)..(1): N-terminal amino group replaced with hydroxy group
  MISC_FEATURE (7)..(11): Lactam bridge connecting residues 7 and 11
  MOD_RES (35)..(35): Pegylated
  MOD_RES (35)..(35): C-terminal alpha carboxylate replaced with amide
FTSDYSKYLDERRAQDFVQWLMDTGPSSGAPPPSC

SEQ ID NO: 1490 - protein, 24 aa, Artificial Sequence
  Synthetic Polypeptide
  MOD_RES (1)..(1): N-terminal amino group replaced with hydroxy group
  MISC_FEATURE (11)..(15): Lactam bridge connecting residues 11 and 15
  MOD_RES (19)..(19): Pegylated
  MOD_RES (24)..(24): C-terminal alpha carboxylate replaced with amide
FTSDYSKYLDERRAKDFVCWLMDT

SEQ ID NO: 1491 - protein, 35 aa, Artificial Sequence
  Synthetic Polypeptide
  MOD_RES (1)..(1): N-terminal amino group replaced with hydroxy group
  MISC_FEATURE (11)..(15): Lactam bridge connecting residues 11 and 15
  MOD_RES (35)..(35): Pegylated
  MOD_RES (35)..(35): C-terminal alpha carboxylate replaced with amide
FTSDYSKYLDERRAKDFVQWLMDTGPSSGAPPPSC

SEQ ID NO: 1492 - protein, 24 aa, Artificial Sequence
  Synthetic Polypeptide
  MOD_RES (1)..(1): N-terminal amino group replaced with hydroxy group
  MOD_RES (1)..(1): Covalently attached to a C16 fatty acid
  MISC_FEATURE (11)..(15): Lactam bridge connection residues 11 and 15
  MOD_RES (24)..(24): C-terminal alpha carboxylate replaced with amide
FTSDYSKYLDERRAKDFVQWLMDT

SEQ ID NO: 1493 - protein, 24 aa, Artificial Sequence
  Synthetic Polypeptide
  MOD_RES (1)..(1): N-terminal amino group replaced with hydroxy group
  MOD_RES (5)..(5): Linked to a C16 fatty acid via Glu residue
  MISC_FEATURE (11)..(15): Lactam bridge connecting residues 11 and 15
  MISC_FEATURE (15)..(15): Linked to a C16 fatty acid via Glu residue
  MOD_RES (24)..(24): C-terminal alpha carboxylate replaced with amide
FTSDKSKYLDERRAKDFVQWLMDT

SEQ ID NO: 1494 - protein, 24 aa, Artificial Sequence
  Synthetic Polypeptide
  MOD_RES (1)..(1): N-terminal amino group replaced with hydroxy group
  MISC_FEATURE (15)..(15): Linked to C16 fatty acid via Glu residue
  MOD_RES (24)..(24): C-terminal alpha carboxylate replaced with amide
FTSDYSKYLDERRAKDFVQWLMDT

SEQ ID NO: 1495 - protein, 24 aa, Artificial Sequence
  Synthetic Polypeptide
  MOD_RES (1)..(1): N-terminal amino group replaced with hydroxy group
  MISC_FEATURE (11)..(15): Lactam bridge connecting residues 11 and 15
  MISC_FEATURE (19)..(19): Linked to a C16 fatty acid via Glu residue
  MOD_RES (24)..(24): C-terminal alpha carboxylate replaced with amide
FTSDYSKYLDERRAKDFVKWLMDT

SEQ ID NO: 1496 - protein, 24 aa, Artificial Sequence
  Synthetic Polypeptide
  MOD_RES (1)..(1): N-terminal amino group replaced with hydroxy group
  MISC_FEATURE (11)..(15): Lactam bridge connecting residues 11 and 15
  MISC_FEATURE (24)..(24): Linked to a C16 fatty acid via Glu residue
  MOD_RES (24)..(24): C-terminal alpha carboxylate replaced with amide
FTSDYSKYLDERRAKDFVQWLMDK

SEQ ID NO: 1497 - protein, 24 aa, Artificial Sequence
  Synthetic Polypeptide
  MOD_RES (1)..(1): N-terminal amino group replaced with hydroxy group
  MISC_FEATURE (11)..(11): Xaa is amino isobutyric acid
  MOD_RES (24)..(24): C-terminal alpha carboxylate replaced with amide
FTSDYSKYLDXRRAQDFVQWLMNT

SEQ ID NO: 1498 - protein, 24 aa, Artificial Sequence
  Synthetic Polypeptide
  MOD_RES (1)..(1): N-terminal amino group replaced with hydroxy group
  MISC_FEATURE (11)..(11)
  MISC_FEATURE (15)..(15): Xaa is alpha isobutyric acid
  MOD_RES (24)..(24): C-terminal alpha carboxylate replaced with amide
FTSDKSKYLDXRRAXDFVCWLMNT

SEQ ID NO: 1499 - protein, 24 aa, Artificial Sequence
  Synthetic Polypeptide
  MOD_RES (1)..(1): N-terminal amino group replaced with hydroxy group
  MOD_RES (24)..(24): C-terminal alpha carboxylate replaced with amide
FTSDYSKYLDERRAQDFVQWLMNT

SEQ ID NO: 1500 - protein, 24 aa, Artificial Sequence
  Synthetic Polypeptide
  MOD_RES (1)..(1): N-terminal amino group replaced with hydroxy group
  MOD_RES (24)..(24): C-terminal alpha carboxylate replaced with amide
FTSDKSKYLDERRAQDFVCWLMNT

SEQ ID NO: 1501 - protein, 24 aa, Artificial Sequence
  Synthetic Polypeptide
  MISC_FEATURE (4)..(7): Lactam bridge connecting residues 4 and 7
  MOD_RES (11)..(11): Xaa is alpha isobutyric acid
  MOD_RES (24)..(24): C-terminal carboxylate replaced with amide
FTSEYSKYLDXRRAQDFVQWLMNT

SEQ ID NO: 1502 - protein, 24 aa, Artificial Sequence
  Synthetic Polypeptide
  MISC_FEATURE (4)..(7): Lactam bridge connecting residues 4 and 7
  MOD_RES (11)..(11): Xaa is alpha isobutyric acid
  MOD_RES (24)..(24): C-terminal carboxylate replaced with amide
FTSEYSKYLDXRRAQDFVQWLMNT

SEQ ID NO: 1503 - protein, 24 aa, Artificial Sequence
  Synthetic Polypeptide
  MOD_RES (1)..(1): N-terminal amino group replaced with hydroxy group
  MISC_FEATURE (11)..(15): Lactam bridge connecting residues 11 and 15
  MOD_RES (24)..(24): C-terminal alpha carboxylate replaced with amide
FTSDYSKYLDERRAKEFVQWLMDT

SEQ ID NO: 1504 - protein, 24 aa, Artificial Sequence
  Synthetic Polypeptide
  MOD_RES (1)..(1): N-terminal amino group replaced with hydroxy group
  MOD_RES (24)..(24): C-terminal alpha carboxylate replaced with amide
FTSDYSKYLDEQAAKEFIAWLMNT

SEQ ID NO: 1505 - protein, 34 aa, Artificial Sequence; identical to SEQ ID NO: 1430
  Synthetic Polypeptide
  MOD_RES (34)..(34): C-terminal alpha carboxylate replaced with amide

SEQ ID NO: 1506 - protein, 24 aa, Artificial Sequence
  Synthetic Polypeptide
  MOD_RES (1)..(1): N-terminal amino group replaced with hydroxy group
  MISC_FEATURE (5)..(5): Linked to a C16 fatty acid via Glu residue
  MISC_FEATURE (7)..(7): Linked to a C16 fatty acid via Glu residue
  MOD_RES (24)..(24): C-terminal carboxylate replaced with amide
FTSDKSKYLDERRAKDFVQWLMDT

SEQ ID NO: 1507 - protein, 6 aa, Artificial Sequence
  Synthetic Polypeptide
  MISC_FEATURE (1)..(1): Xaa1 is selected from a group consisting of His, D-histidine, alpha, alpha-dimethyl imidiazole acetic acid (DMIA), N-methyl histidine, alpha-methyl histidine, imidazole acetic acid, desaminohistidine, hydroxyl-histidine, acetyl-histidine and
  MISC_FEATURE (2)..(2): Xaa is selected from a group consisting of Ser, D-serine, D-alanine, valine, glycine, N-methyl serine, and aminoisobutyric acid (AIB)
  MISC_FEATURE (3)..(3): Xaa is selected from a group consisting of Glu or Gln
XXXTGF

SEQ ID NO: 1508 - protein, 5 aa, Artificial Sequence
  Synthetic Polypeptide
  MISC_FEATURE (1)..(1): Xaa is selected from a group consisting of Ser, D-serine, D-alanine, valine, glycine, N-methyl serine, and aminoisobutyric acid (AIB)
  MISC_FEATURE (2)..(2): Xaa is selected from a group consisting of Glu or Gln
XXTGF

SEQ ID NO: 1509 - protein, 4 aa, Artificial Sequence
  Synthetic Polypeptide
  MISC_FEATURE (1)..(1): Xaa is selected from a group consisting of Glu or Gln
XTGF

SEQ ID NO: 1510 - protein, 24 aa, Artificial Sequence
  Synthetic Polypeptide
  MOD_RES (1)..(1): N-terminal amino group replaced with hydroxy group
  MOD_RES (24)..(24): C-terminal alpha carboxylate replaced with amide
FTSDYSKYLDSRRAQDFVQWLMDT

SEQ ID NO: 1511 - protein, 28 aa, Artificial Sequence
  Synthetic Polypeptide
  MOD_RES (28)..(28): C-terminal alpha carboxylate replaced with amide
SQGTFTSEYSKYLDSRRAQDFVQWLMNT

SEQ ID NO: 1512 - protein, 28 aa, Artificial Sequence
  Synthetic Polypeptide
  MISC_FEATURE (4)..(5): Threonine at position 4 and phenyl lactic acid at position 5 linked via ester bond
  MISC_FEATURE (5)..(5): Xaa is phenyl lactic acid
  MOD_RES (28)..(28): C-terminal alpha carboxylate replaced with amide
SQGTXTSEYSKYLDSRRAQDFVQWLMNT

SEQ ID NO: 1513 - protein, 29 aa, Artificial Sequence
  Synthetic Polypeptide
  MISC_FEATURE (5)..(6): Threorine at position 5 and phenyl lactic acid at position 6 linked via ester bond
  MISC_FEATURE (6)..(6): Xaa is phenyl lactic acid
  MOD_RES (29)..(29): C-terminal alpha carboxylate replaced with amide
HSQGTXTSEYSKYLDSRRAQDFVQWLMNT

SEQ ID NO: 1514 - protein, 24 aa, Artificial Sequence
  Synthetic Polypeptide
  MOD_RES (1)..(1): N-terminal amino group replaced with hydroxy group
  MISC_FEATURE (11)..(15): Lactam bridge connecting residues 11 and 15
  MOD_RES (19)..(19): Pegylated
  MOD_RES (24)..(24): C-terminal alpha carboxylate replaced with amide
FTSEYSKYLDERRAKDFVCWLMNT

SEQ ID NO: 1515 - protein, 24 aa, Artificial Sequence
  Synthetic Polypeptide
  MOD_RES (1)..(1): N-terminal amino group replaced with hydroxy group
  MISC_FEATURE (11)..(15): Lactam bridge connecting residues 11 and 15
  MISC_FEATURE (19)..(19): Pegylated via spacer
  MOD_RES (24)..(24): C-terminal alpha carboxylate replaced with amide
FTSDYSKYLDERRAKDFVKWLMDT

SEQ ID NO: 1516 - protein, 24 aa, Artificial Sequence
  Synthetic Polypeptide
  MOD_RES (1)..(1): N-terminal amino group replaced with hydroxy group
  MISC_FEATURE (11)..(15): Lactam bridge connecting residues 11 and 15
  MOD_RES (19)..(19): Pegylated via rigid spacer
  MOD_RES (24)..(24): C-terminal alpha carboxylate replaced with amide
FTSDYSKYLDERRAKDFVKWLMDT

SEQ ID NO: 1517 - protein, 35 aa, Artificial Sequence
  Synthetic Polypeptide
  MISC_FEATURE (1)..(1): N-terminal amino group replaced with hydroxy group
  MISC_FEATURE (11)..(15): Lactam bridge connecting residues 11 and 15
  MOD_RES (35)..(35): Pegylated
  MOD_RES (35)..(35): C-terminal alpha carboxylate replaced with amide
FTSDYSKYLDERRAKDFVQWLMDTGPGPGPGPGPC

SEQ ID NO: 1518 - protein, 35 aa, Artificial Sequence
  Synthetic Polypeptide
  MOD_RES (1)..(1): N-terminal amino group replaced with hydroxy group
  MISC_FEATURE (11)..(15): Lactam bridge connecting residues 11 and 15
  MOD_RES (35)..(35): Pegylated
  MOD_RES (35)..(35): C-terminal alpha carboxylate reaplaced with amide
FTSDYSKYLDERRAKDFVQWLMDGGPSSGAPPPSC

SEQ ID NO: 1519-1600 - skipped (82 entries)

SEQ ID NO: 1601 - protein, 29 aa, Homo sapiens
  MOD_RES (29)..(29): C-terminal amidation
HSQGTFTSDYSKYLDSRRAQDPVQWLMNT

SEQ ID NO: 1602 - protein, 24 aa, Artificial Sequence
  Glucagon analog
  MOD_RES (1)..(1): N-terminal amino group replaced with hydroxy group
FTSDYSKYLDSRRAQDFVQWLMNT

SEQ ID NO: 1603 - protein, 31 aa, Homo sapiens; identical to SEQ ID NO: 50

SEQ ID NO: 1604 - protein, 30 aa, Homo sapiens; identical to SEQ ID NO: 52
  MOD_RES (30)..(30): AMIDATION

SEQ ID NO: 1605 - protein, 28 aa, Homo sapiens
HGEGTFTSDLSKQMEEAVRLFIEWLKNG

SEQ ID NO: 1606 - protein, 37 aa, Homo sapiens; identical to SEQ ID NO: 825

SEQ ID NO: 1607 - protein, 42 aa, Homo sapiens; identical to SEQ ID NO: 1004

SEQ ID NO: 1608 - protein, 33 aa, Homo sapiens
HADGSFSDEMNTILDNLAARDFINWLIQTKITD

SEQ ID NO: 1609 - protein, 49 aa, Homo sapiens
YLYQWLGAPVPYPDPLEPRREVCELNPDCDELADHIGFQEAYRRFYGPV

SEQ ID NO: 1610 - protein, 10 aa, Artificial Sequence
  peptide fragment representing the carboxy terminal 10 amino acids of Exendin-4
GPSSGAPPPS

SEQ ID NO: 1611 - protein, 10 aa, Artificial Sequence
  peptide fragment representing the carboxy terminal 10 amino acids of Exendin-4
  MOD_RES (10)..(10): AMIDATION
GPSSGAPPPS

SEQ ID NO: 1612 - protein, 11 aa, Artificial Sequence
  peptide fragment representing the carboxy terminal 10 amino acids of Exendin-4
  MOD_RES (11)..(11): Pegylation
GPSSGAPPPSC

SEQ ID NO: 1613 - protein, 13 aa, Artificial Sequence
  peptide fragment representing the carboxy terminal 13 amino acids of GIP peptide
KGKKNDWKHNITQ

SEQ ID NO: 1614 - protein, 8 aa, Artificial Sequence
  peptide fragment representing the carboxy terminal 8 amino acids of oxyntomodulin
KRNRNNIA

SEQ ID NO: 1615 - protein, 6 aa, Artificial Sequence
  Glucagon analogue
  MOD_RES (6)..(6): C-terminal amide
HTRGTF

SEQ ID NO: 1616 - protein, 6 aa, Artificial Sequence
  glucagon analogue
  MOD_RES (1)..(1): d-histidine
  MOD_RES (2)..(2): d-threonine
  MOD_RES (3)..(3): d-arginine
  MOD_RES (5)..(5): d-threonine
  MOD_RES (6)..(6): d-phenylalanine
  MOD_RES (6)..(6): C-terminal amidation
XXXGXX

SEQ ID NO: 1617 - protein, 30 aa, Artificial Sequence
  glucagon analogue
  MOD_RES (24)..(24): pegylation
HAEGTFTSDVSSYLEGQAAKEFICWLVKGR

SEQ ID NO: 1618 - protein, 39 aa, Heloderma suspectum
HGEGTFTSDLSKQMEEEAVRLFIEWLKNGGPSSGAPPPS

SEQ ID NO: 1619 - protein, 29 aa, Homo sapiens
YADAIFTNSYRKVLGQLSARKLLQDIMSR

SEQ ID NO: 1620 - protein, 28 aa, Homo sapiens
  MOD_RES (28)..(28): AMIDATION
HSDAVFTDNYTRLRKQMAVKKYLNSILN

SEQ ID NO: 1621 - protein, 27 aa, Homo sapiens
HSDGIFTDSYSRYRKQMAVKKYLAAVL

SEQ ID NO: 1622 - protein, 27 aa, Homo sapiens
  MOD_RES (27)..(27): AMIDATION
HADGVFTSDFSKLLGQLSAKKYLESLM

SEQ ID NO: 1623 - protein, 27 aa, Homo sapiens
  MOD_RES (27)..(27): AMIDATION
HSDGTFTSELSRLREGARLQRLLQGLV

SEQ ID NO: 1624 - protein, 30 aa, Artificial Sequence
  Synthetic peptide
  MOD_RES (2)..(2): Xaa is AIB
  MOD_RES (24)..(24): Cys residue linked to 40kDa PEG via maleimide
  MOD_RES (30)..(30): C-terminal amidation
HXQGTFTSDYSKYLDEQAAKEFICWLMNTN

SEQ ID NO: 1625 - protein, 29 aa, Artificial Sequence
  Synthetic peptide
  MOD_RES (2)..(2): Xaa is AIB
  MISC_FEATURE (24)..(24): Covalently bound to 40K PEG via thioether
  MOD_RES (29)..(29): AMIDATION
HXEGTFTSDYSKYLDEQAAKEFICWLMNT

SEQ ID NO: 1626 - protein, 31 aa, Artificial Sequence
  Synthetic peptide
  MOD_RES (1)..(1): d-lysine
  MOD_RES (2)..(2): Sarcosine (N-methyl glycine)
  MOD_RES (4)..(4): Xaa is AIB
  MOD_RES (24)..(24): Covalently bound to 40kDa PEG via thioether
  MOD_RES (31)..(31): AMIDATION
KGHXEGTFTSDYSKYLDEQAAKEFICWLMNT

SEQ ID NO: 1627 - protein, 31 aa, Artificial Sequence; identical to SEQ ID NO: 1626
  Synthetic peptide
  MOD_RES (1)..(1): d-lysine
  MOD_RES (2)..(2): N-hexyl-glycine
  MOD_RES (4)..(4): Xaa is AIB
  MOD_RES (24)..(24): Covalently bound to 40kDa PEG via maleimide
  MOD_RES (31)..(31): AMIDATION

SEQ ID NO: 1628 - protein, 31 aa, Artificial Sequence
  Synthetic peptide
  MOD_RES (1)..(1): d-lysine
  MOD_RES (2)..(2): N-methyl phenylalanine
  MOD_RES (4)..(4): Xaa is AIB
  MOD_RES (24)..(24): Covalently bound to 40kDa PEG via thioether
  MOD_RES (31)..(31): AMIDATION
KFHXEGTFTSDYSKYLDEQAAKEFICWLMNT

SEQ ID NO: 1629 - protein, 29 aa, Artificial Sequence
  Synthetic peptide
  MOD_RES (2)..(2): Xaa is AIB
  MOD_RES (24)..(24): Covalently bound to 40 kDa PEG via maleimide
HXEGTFTSDYSKYLDEQAAKEFICWLMNT

SEQ ID NO: 1630 - protein, 29 aa, Artificial Sequence
  Synthetic peptide
  MOD_RES (1)..(1): Xaa is DMIA
  MISC_FEATURE (16)..(20): Lactam ring between side chains of amino acids
  MOD_RES (24)..(24): Covalently bound to 40kDa PEG via maleimide
  MOD_RES (29)..(29): C-terminal amidation
XSQGTFTSDKSKYLDERRAKDFVCWLMNT

SEQ ID NO: 1631 - protein, 30 aa, Artificial Sequence
  Synthetic peptide
  MOD_RES (30)..(30): C-terminal amidation
HSQGTFTSDYSKYLDEQAAKEFIAWLMNTN

SEQ ID NO: 1632 - protein, 8 aa, Artificial Sequence
  Synthetic peptide
  MOD_RES (1)..(1): Xaa is Phe, hydroxyl-Phe, Gly, hydroxyl-Gly, Ala, Cys, Ser, Lys, Glu, dehydro-Val, Pro, d-Pro, AIB, 1-aminocyclohexanecarboxylic acid, 1-aminocyclopropanecarboxylic acid, N-Me-AIB, alpha-alpha-diethyl-Gly, hydroxyl-AIB, or d-Lys
  MOD_RES (2)..(2): Xaa is Pro, d-Pro, N-methyl-Gly, N-hexyl-Gly, Azetidine-2-carboxylic acid, N-methyl-Ala, or N-methyl-Phe
  MOD_RES (3)..(3): Xaa is His, d-His, Ala, or N-methyl-His
  MOD_RES (8)..(8): C-terminal amidation
XXXSRGTF

SEQ ID NO: 1633 - protein, 31 aa, Artificial Sequence
  Synthetic peptide
  MOD_RES (1)..(1): d-Lys
  MOD_RES (2)..(2): Xaa is Sar
  MOD_RES (4)..(4): Xaa is AIB
  MOD_RES (26)..(26): Covalently bound to PEG via 40kDa maleimide
KXHXEGTFTSDYSKYLDEQAAKEFICWLMNT

SEQ ID NO: 1634 - protein, 32 aa, Artificial Sequence
  Synthetic peptide
  MOD_RES (1)..(1): d-Lys
  MOD_RES (2)..(2): Xaa is Sar
  MOD_RES (4)..(4): Xaa is AIB
  MOD_RES (26)..(26): Cys residue linked to 40kDa PEG via maleimide
  MOD_RES (32)..(32): C-terminal amidation
KXHXQGTFTSDYSKYLDEQAAKEFICWLMNTN

SEQ ID NO: 1635 - protein, 31 aa, Artificial Sequence
  Synthetic peptide
  MOD_RES (1)..(1): d-Lys
  MOD_RES (2)..(2): Xaa is Sar
  MOD_RES (3)..(3): Xaa is DMIA
  MISC_FEATURE (18)..(22): Lactam ring between side chains of amino acids
  MOD_RES (26)..(26): Covalently bound to 40kDa PEG via maleimide
  MOD_RES (31)..(31): C-terminal amidation
KXXSQGTFTSDKSKYLDERRAKDFVCWLMNT

SEQ ID NO: 1636 - protein, 31 aa, Artificial Sequence; identical to SEQ ID NO: 1626
  Synthetic peptide
  MOD_RES (1)..(1): d-Lys
  MOD_RES (2)..(2): N-hexyl-Gly
  MOD_RES (4)..(4): Xaa is AIB
  MISC_FEATURE (26)..(26): Covalently bound to 40K PEG via thioether
  MOD_RES (31)..(31): AMIDATION

SEQ ID NO: 1637 - protein, 32 aa, Artificial Sequence
  Synthetic peptide
  MOD_RES (1)..(1): d-Lys
  MOD_RES (2)..(2): N-hexyl-Gly
  MOD_RES (4)..(4): Xaa is AIB
  MOD_RES (26)..(26): Cys residue linked to 40kDa PEG via maleimide
  MOD_RES (32)..(32): C-terminal amidation
KGHXQGTFTSDYSKYLDEQAAKEFICWLMNTN

SEQ ID NO: 1638 - protein, 31 aa, Artificial Sequence
  Synthetic peptide
  MOD_RES (1)..(1): d-Lys
  MOD_RES (2)..(2): N-hexyl-Gly
  MOD_RES (3)..(3): Xaa is DMIA
  MISC_FEATURE (18)..(22): Lactam ring between side chains of amino acids
  MOD_RES (26)..(26): Covalently bound to 40kDa PEG via maleimide
  MOD_RES (31)..(31): C-terminal amidation
KGXSQGTFTSDKSKYLDERRAKDFVCWLMNT

SEQ ID NO: 1639 - protein, 31 aa, Artificial Sequence; identical to SEQ ID NO: 1628
  Synthetic peptide
  MOD_RES (1)..(1): d-Lys
  MOD_RES (2)..(2): N-methyl-Phe
  MOD_RES (4)..(4): Xaa is AIB
  MOD_RES (26)..(26): Covalently bound to 40kDa PEG via maleimide

SEQ ID NO: 1640 - protein, 32 aa, Artificial Sequence
  Synthetic peptide
  MOD_RES (1)..(1): d-Lys
  MOD_RES (2)..(2): N-methyl-Phe
  MOD_RES (4)..(4): Xaa is AIB
  MOD_RES (26)..(26): Cys residue linked to 40kDa PEG via maleimide
  MOD_RES (32)..(32): C-terminal amidation
KFHXQGTFTSDYSKYLDEQAAKEFICWLMNTN

SEQ ID NO: 1641 - protein, 31 aa, Artificial Sequence
  Synthetic peptide
  MOD_RES (1)..(1): d-Lys
  MOD_RES (2)..(2): N-methyl-Phe
  MOD_RES (3)..(3): Xaa is DMIA
  MISC_FEATURE (18)..(22): Lactam ring between side chains of amino acids
  MOD_RES (26)..(26): Covalently bound to 40kDa PEG via maleimide
  MOD_RES (31)..(31): C-terminal amidation
KFXSQGTFTSDKSKYLDERRAKDFVCWLMNT

SEQ ID NO: 1642 - protein, 27 aa, Artificial Sequence
  Synthetic peptide
HADGVFTSDFSKLLGQLSAKKYLESLM

SEQ ID NO: 1643 - protein, 4 aa, Artificial Sequence
  Synthetic peptide
KRNR

SEQ ID NO: 1644 - protein, 100 aa, Homo sapiens
MRALTLLALLALAALCIAGQAGAKPSGAESSKGAAFVSKQEGSEVVKRPRRYLYQWLGAPVPYPDPLEPRREVCELNPDCDELADHIGFQEAYRRFYGPV

SEQ ID NO: 1645 - protein, 32 aa, Homo sapiens
CGNLSTCMLGTYTQDFNKFHTFPQTAIGVGAP

SEQ ID NO: 1646 - protein, 37 aa, Homo sapiens [sequence omitted]

SEQ ID NO: 1647 - protein, 40 aa, Artificial Sequence
  Synthetic peptide
  MOD_RES (2)..(2): Xaa is AIB
  MOD_RES (40)..(40): C-terminal amidation
HXEGTFTSDVSSYLEEQAAKEFIAWLVKGGPSSGAPPPSK

SEQ ID NO: 1648 - protein, 40 aa, Artificial Sequence
  Synthetic peptide
  MOD_RES (2)..(2): Xaa is AIB
  MISC_FEATURE (40)..(40): C-terminal amidation
HXEGTFTSDVSSYLEGQAAKEAIAWLVKGGPSSGAPPPSK

SEQ ID NO: 1649 - protein, 40 aa, Artificial Sequence
  Synthetic peptide
  MOD_RES (1)..(1): D-Ala
  MOD_RES (2)..(2): Xaa is AIB
  MOD_RES (3)..(3): D-Glu
  MOD_RES (5)..(5): D-Thr
  MOD_RES (6)..(6): D-Phe
  MOD_RES (7)..(7): D-Thr
  MOD_RES (8)..(8): D-Ser
  MOD_RES (9)..(9): D-Asp
  MOD_RES (10)..(10): D-Val
  MOD_RES (11)..(11): D-Ser
  MOD_RES (12)..(12): D-Ser
  MOD_RES (13)..(13): D-Tyr
  MOD_RES (14)..(14): D-Leu
  MOD_RES (15)..(15): D-Glu
  MOD_RES (17)..(17): D-Gln
  MOD_RES (18)..(18): D-Ala
  MOD_RES (19)..(19): D-Ala
  MOD_RES (20)..(20): D-Lys
  MOD_RES (21)..(21): D-Glu
  MOD_RES (22)..(22): D-Ala
  MOD_RES (23)..(23): D-Ile
  MOD_RES (24)..(24): D-Ala
  MOD_RES (25)..(25): D-Trp
  MOD_RES (26)..(26): D-Leu
  MOD_RES (27)..(27): D-Val
  MOD_RES (28)..(28): D-Lys
  MOD_RES (31)..(31): D-Pro
  MOD_RES (32)..(32): D-Ser
  MOD_RES (33)..(33): D-Ser
  MOD_RES (35)..(35): D-Ala
  MOD_RES (36)..(36): D-Pro
  MOD_RES (37)..(37): D-Pro
  MOD_RES (38)..(38): D-Pro
  MOD_RES (39)..(39): D-Ser
  MOD_RES (40)..(40): C-terminal amidation
AXEGTFTSDVSSYLEGQAAKEAIAWLVKGGPSSGAPPPSK

SEQ ID NO: 1650 - protein, 40 aa, Artificial Sequence
  Synthetic peptide
  MOD_RES (2)..(2): Xaa is AIB
  MOD_RES (24)..(24): Covalently bound to 40kDa PEG via thioether
  MOD_RES (40)..(40): C-terminal amidation
HXEGTFTSDVSSYLEEQAAKEFICWLVKGGPSSGAPPPSK

SEQ ID NO: 1651 - protein, 40 aa, Artificial Sequence; identical to SEQ ID NO: 1647
  Synthetic peptide
  MOD_RES (2)..(2): Xaa is AIB
  MOD_RES (40)..(40): Covalently bound to 3-position of beta-estradiol via ether linkage
  MOD_RES (40)..(40): C-terminal amidation

SEQ ID NO: 1652 - protein, 40 aa, Artificial Sequence; identical to SEQ ID NO: 1648
  Synthetic peptide
  MOD_RES (2)..(2): Xaa is AIB
  MOD_RES (40)..(40): Covalently bound to 3-position of beta-estradiol via ether linkage
  MOD_RES (40)..(40): C-terminal amidation

SEQ ID NO: 1653 - protein, 40 aa, Artificial Sequence; identical to SEQ ID NO: 1649
  Synthetic peptide
  MOD_RES (1)..(1): D-Ala
  MOD_RES (2)..(2): Xaa is AIB
  MOD_RES (3)..(3): D-Glu
  MOD_RES (5)..(5): D-Thr
  MOD_RES (6)..(6): D-Phe
  MOD_RES (7)..(7): D-Thr
  MOD_RES (8)..(8): D-Ser
  MOD_RES (9)..(9): D-Asp
  MOD_RES (10)..(10): D-Val
  MOD_RES (11)..(11): D-Ser
  MOD_RES (12)..(12): D-Ser
  MOD_RES (13)..(13): D-Tyr
  MOD_RES (14)..(14): D-Leu
  MOD_RES (15)..(15): D-Glu
  MOD_RES (17)..(17): D-Gln
  MOD_RES (18)..(18): D-Ala
  MOD_RES (19)..(19): D-Ala
  MOD_RES (20)..(20): D-Lys
  MOD_RES (21)..(21): D-Glu
  MOD_RES (22)..(22): D-Ala
  MOD_RES (23)..(23): D-Ile
  MOD_RES (24)..(24): D-Ala
  MOD_RES (25)..(25): D-Trp
  MOD_RES (26)..(26): D-Leu
  MOD_RES (27)..(27): D-Val
  MOD_RES (28)..(28): D-Lys
  MOD_RES (31)..(31): D-Pro
  MOD_RES (32)..(32): D-Ser
  MOD_RES (33)..(33): D-Ser
  MOD_RES (35)..(35): D-Ala
  MOD_RES (36)..(36): D-Pro
  MOD_RES (37)..(37): D-Pro
  MOD_RES (38)..(38): D-Pro
  MOD_RES (39)..(39): D-Ser
  MOD_RES (40)..(40): Covalently bound to 3-position of beta-estradiol via ether linkage
  MOD_RES (40)..(40): C-terminal amidation

SEQ ID NO: 1654 - protein, 40 aa, Artificial Sequence; identical to SEQ ID NO: 1650
  Synthetic peptide
  MOD_RES (2)..(2): Xaa is AIB
  MOD_RES (24)..(24): Covalently bound to 40kDa PEG via thioether
  MOD_RES (40)..(40): Covalently bound to 3-position of beta-estradiol via ether linkage
  MOD_RES (40)..(40): C-terminal amidation

SEQ ID NO: 1655 - protein, 40 aa, Artificial Sequence; identical to SEQ ID NO: 1647
  Synthetic peptide
  MOD_RES (2)..(2): Xaa is AIB
  MOD_RES (40)..(40): Covalently bound to 17-position of beta-estradiol via ester linkage
  MOD_RES (40)..(40): C-terminal amidation

SEQ ID NO: 1656 - protein, 40 aa, Artificial Sequence; identical to SEQ ID NO: 1648
  Synthetic peptide
  MOD_RES (2)..(2): Xaa is AIB
  MOD_RES (40)..(40): Covalently bound to 17-position of beta-estradiol via ester linkage
  MOD_RES (40)..(40): C-terminal amidation

SEQ ID NO: 1657 - protein, 40 aa, Artificial Sequence; identical to SEQ ID NO: 1649
  Synthetic peptide
  MOD_RES (1)..(1): D-Ala
  MOD_RES (2)..(2): Xaa is AIB
  MOD_RES (3)..(3): D-Glu
  MOD_RES (5)..(5): D-Thr
  MOD_RES (6)..(6): D-Phe
  MOD_RES (7)..(7): D-Thr
  MOD_RES (8)..(8): D-Ser
  MOD_RES (9)..(9): D-Asp
  MOD_RES (10)..(10): D-Val
  MOD_RES (11)..(11): D-Ser
  MOD_RES (12)..(12): D-Ser
  MOD_RES (13)..(13): D-Tyr
  MOD_RES (14)..(14): D-Leu
  MOD_RES (15)..(15): D-Glu
  MOD_RES (17)..(17): D-Gln
  MOD_RES (18)..(18): D-Ala
  MOD_RES (19)..(19): D-Ala
  MOD_RES (20)..(20): D-Lys
  MOD_RES (21)..(21): D-Glu
  MOD_RES (22)..(22): D-Ala
  MOD_RES (23)..(23): D-Ile
  MOD_RES (24)..(24): D-Ala
  MOD_RES (25)..(25): D-Trp
  MOD_RES (26)..(26): D-Leu
  MOD_RES (27)..(27): D-Val
  MOD_RES (28)..(28): D-Lys
  MOD_RES (31)..(31): D-Pro
  MOD_RES (32)..(32): D-Ser
  MOD_RES (33)..(33): D-Ser
  MOD_RES (35)..(35): D-Ala
  MOD_RES (36)..(36): D-Pro
  MOD_RES (37)..(37): D-Pro
  MOD_RES (38)..(38): D-Pro
  MOD_RES (39)..(39): D-Ser
  MOD_RES (40)..(40): Covalently bound to 17-position of beta-estradiol via ester linkage
  MOD_RES (40)..(40): C-terminal amidation

SEQ ID NO: 1658 - protein, 40 aa, Artificial Sequence; identical to SEQ ID NO: 1647
  Synthetic peptide
  MOD_RES (2)..(2): Xaa is AIB
  MOD_RES (40)..(40): Covalently bound to 3-position of 17-acetyl-beta estradiol via ester linkage
  MOD_RES (40)..(40): C-terminal amidation

SEQ ID NO: 1659 - protein, 40 aa, Artificial Sequence; identical to SEQ ID NO: 1649
  Synthetic peptide
  MOD_RES (1)..(1): D-Ala
  MOD_RES (2)..(2): Xaa is AIB
  MOD_RES (3)..(3): D-Glu
  MOD_RES (5)..(5): D-Thr
  MOD_RES (6)..(6): D-Phe
  MOD_RES (7)..(7): D-Thr
  MOD_RES (8)..(8): D-Ser
  MOD_RES (9)..(9): D-Asp
  MOD_RES (10)..(10): D-Val
  MOD_RES (11)..(11): D-Ser
  MOD_RES (12)..(12): D-Ser
  MOD_RES (13)..(13): D-Tyr
  MOD_RES (14)..(14): D-Leu
  MOD_RES (15)..(15): D-Glu
  MOD_RES (17)..(17): D-Gln
  MOD_RES (18)..(18): D-Ala
  MOD_RES (19)..(19): D-Ala
  MOD_RES (20)..(20): D-Lys
  MOD_RES (21)..(21): D-Glu
  MOD_RES (22)..(22): D-Ala
  MOD_RES (23)..(23): D-Ile
  MOD_RES (24)..(24): D-Ala
  MOD_RES (25)..(25): D-Trp
  MOD_RES (26)..(26): D-Leu
  MOD_RES (27)..(27): D-Val
  MOD_RES (28)..(28): D-Lys
  MOD_RES (31)..(31): D-Pro
  MOD_RES (32)..(32): D-Ser
  MOD_RES (33)..(33): D-Ser
  MOD_RES (35)..(35): D-Ala
  MOD_RES (36)..(36): D-Pro
  MOD_RES (37)..(37): D-Pro
  MOD_RES (38)..(38): D-Pro
  MOD_RES (39)..(39): D-Ser
  MOD_RES (40)..(40): Covalently bound to 3-position of 17-acetyl-beta estradiol via ester linkage
  MOD_RES (40)..(40): C-terminal amidation

SEQ ID NO: 1660 - protein, 40 aa, Artificial Sequence; identical to SEQ ID NO: 1650
  Synthetic peptide
  MOD_RES (2)..(2): Xaa is AIB
  MOD_RES (24)..(24): Covalently bound to 40kDa PEG via thioether
  MOD_RES (40)..(40): Covalently bound to 3-position of cholesterol via amide linkage
  MOD_RES (40)..(40): C-terminal amidation

SEQ ID NO: 1661 - protein, 40 aa, Artificial Sequence; identical to SEQ ID NO: 1647
  Synthetic peptide
  MOD_RES (2)..(2): Xaa is AIB
  MOD_RES (40)..(40): Covalently bound to 3-position of cholesterol via amide linkage
  MOD_RES (40)..(40): C-terminal amidation

SEQ ID NO: 1662 - protein, 40 aa, Artificial Sequence
  Synthetic peptide
  MOD_RES (2)..(2): Xaa is AIB
  MOD_RES (40)..(40): Covalently bound to 17-position of estradiol via hydrazone linkage
  MOD_RES (40)..(40): C-terminal amidation
HXEGTFTSDVSSYLEEQAAKEFIAWLVKGGPSSGAPPPSC

SEQ ID NO: 1663 - protein, 40 aa, Artificial Sequence; identical to SEQ ID NO: 1662
  Synthetic peptide
  MOD_RES (2)..(2): Xaa is AIB
  MOD_RES (40)..(40): Covalently bound to 17-position of beta-estradiol via carbamate disulfide linkage
  MOD_RES (40)..(40): C-terminal amidation

SEQ ID NO: 1664 - protein, 40 aa, Artificial Sequence
  Synthetic peptide
  MOD_RES (2)..(2): Xaa is AIB
  MOD_RES (40)..(40): Xaa is Beta, beta-dimethyl cysteine
  MOD_RES (40)..(40): Covalently bound to 17-position of estradiol via carbamate disulfide linkage
  MOD_RES (40)..(40): C-terminal amidation
HXEGTFTSDVSSYLEEQAAKEFIAWLVKGGPSSGAPPPSX

SEQ ID NO: 1665 - protein, 40 aa, Artificial Sequence; identical to SEQ ID NO: 1647
  Synthetic peptide
  MOD_RES (2)..(2): Xaa is AIB
  MOD_RES (40)..(40): Covalently bound to 17-position of beta-estradiol via diaminoethane-Phe-Lys linkage
  MOD_RES (40)..(40): C-terminal amidation

SEQ ID NO: 1666 - protein, 40 aa, Artificial Sequence; identical to SEQ ID NO: 1647
  Synthetic peptide
  MOD_RES (2)..(2): Xaa is AIB
  MOD_RES (40)..(40): Covalently bound to 3-position of estrone via ester linkage
  MOD_RES (40)..(40): C-terminal amidation

SEQ ID NO: 1667 - protein, 40 aa, Artificial Sequence; identical to SEQ ID NO: 1647
  Synthetic peptide
  MOD_RES (2)..(2): Xaa is AIB
  MOD_RES (40)..(40): Covalently bound to 17-position of beta-estradiol via carbamate linkage
  MOD_RES (40)..(40): C-terminal amidation

SEQ ID NO: 1668 - protein, 40 aa, Artificial Sequence; identical to SEQ ID NO: 1647
  Synthetic peptide
  MOD_RES (2)..(2): Xaa is AIB
  MOD_RES (40)..(40): Covalently bound to 17-position of beta-estradiol via diaminoethane-Phe-Lys paraaminobenzyl alcohol linkage
  MOD_RES (40)..(40): C-terminal amidation
